(19) United States
(12) Patent Application Publication
(10) Pub. No.: US 2003/0056234 A1
(43) Pub. Date: Mar. 20, 2003

(54) Polymorphic sequences of the human ABCA1 gene, their uses, and detection methods and kits therefor

(76) Inventors: Patrice Denefle, Saint Maur (FR); Marie-Francoise Rosier-Montus, Antony (FR); Isabelle Arnould-Reguigne, Chennevieres Sur Marne (FR); Nicolas Duverger, Paris (FR); Francois Cambien, Paris (FR)

Correspondence Address: FINNEGAN, HENDERSON, FARABOW, GARRETT &, DUNNER LLP, 1300 I STREET, NW, WASHINGTON, DC, 20005, US

(21) Appl. No.: 09/984,827

(22) Filed: Oct. 31, 2001

Related U.S. Application Data
(60) Provisional application No. 60/254,108, filed on Dec. 11, 2000.

(30) Foreign Application Priority Data
Oct. 31, 2000 (FR) 00/14037

(51) Int. Cl. A01K 67/00; C07H 21/04; C12P 21/02; C12N 5/06; C07K 14/435

(52) U.S. Cl. 800/8; 536/23.5; 530/350; 435/69.1; 435/325; 435/320.1

(57) ABSTRACT

The present invention relates to isolated nucleic acids encoding the ABCA1 transporter protein and comprising polymorphic sequence variations, and to peptides which are derived from the human ABCA1 transporter and which contain polymorphic amino acids.

The invention also relates to allele-specific primers and probes which hybridize to regions flanking or containing these polymorphic positions or sites, to methods and kits or packs for analyzing the differences in allelism which affect the ABCA1 gene, and finally to the use of the polymorphisms of the human ABCA1 gene for diagnosing a disease, or a predisposition to a disease, in particular linked to the plasma HDL (High Density Lipoprotein) cholesterol concentration, as is, for example, the case of familial HDL deficiencies such as Tangier disease, myocardial infarction, atherosclerosis and other cardiovascular disorders.

[0001] The present invention relates to polymorphisms of the human ABCA1 gene and the novel polypeptide alleles encoded by the various sequences exhibiting the allelic variations. The invention also relates to methods and kits intended for analyzing the allelic variations in the human ABCA1 gene, and to the use of the ABCA1 polymorphism for diagnosing and treating cardiovascular disorders such as myocardial infarction, atherosclerosis or Tangier disease.

[0002] ABCA1 is a member of the superfamily of ABC (ATP Binding Cassette) transporter proteins which are involved in the transport of peptides, of sugars, of vitamins or of steroid hormones (Dean et al. Curr. Opin. Genet. 5 (1995) 779-785; Decocottignies et al. Nat. Genet. Dev., 15 (1997) 137-145; Allikmets et al., Hum. Mol. Genet, 5 (1996) 1649-1655).

[0003] The members of this transporter family which are, firstly, extremely conserved through evolution, from bacteria to humans, have, secondly, a common general structure characterized by two nucleotide binding folds (or NBFs) with Walker A and B motifs and two transmembrane domains, each of the transmembrane domains consisting of several helixes. The specificity of the ABC transporters for the various molecules transported appears to be determined by the structure of the transmembrane domains, while the energy required for the transport activity is provided by the degradation of the ATP in the NBF fold.

[0004] The transport of cholesterol from the liver to the tissues, and vice versa, is carried out by the two lipoprotein complexes, namely LDLs (Low Density Lipoproteins) and HDLs (High Density Lipoproteins). LDLs supply the tissues with cholesterol whereas, on the other hand, HDLs take the excess cholesterol formed in the tissues to the liver. During transport, the cholesterol is acylated by transferring lecithin fatty acids via the action of the enzyme phosphatidyl sterol acyltransferase (LCAT).

[0005] It is now clearly established in patients with low plasma HDL levels that high LDL levels lead to an accumulation of cholesterol in the vessels and the probability that coronary insufficiency will appear (Castelli et al., Jama (1986) 256(20), 2835-8). Specifically, slower elimination of excess cholesterol in the tissues promotes the formation of arterial plaques, and in the end increases the risk of heart attack, of angina pectoris or of a disorder of the peripheral arterial system.

[0006] These lipoprotein complexes, LDLs and HDLs, which are involved in, respectively, the mechanisms of inflow and outflow of cholesterol, from the liver to the tissues or vice versa, have a spherical structure of different density which is composed essentially of a core of apolar lipids consisting of triacylglycerols and of cholesterol esters and of a crown consisting of apolipoproteins and of amphiphilic lipids.

[0007] It is generally accepted that the outflow of cholesterol from the tissues toward the liver is carried out via two different pathways. A first pathway, termed “passive”, promotes the outflow of cholesterol from the plasma membrane to the HDLs, while the second pathway is energy-dependent and uses in particular the apolipoprotein A-I (Apo-AI) of the nascent HDLs, which is probably recognized and binds to cellular membrane-bound receptors so as to allow the translocation of the excess cholesterol to the HDL particles (Rothblat et al., J. Lipid. Res. (1999) 40(5) 781-96). It has recently been demonstrated in particular that fibroblasts and macrophages are the center of active translocation of cholesterol using lipid-depleted apolipoproteins, such as ApoA-I, ApoA-II and Apo-E (Yokoyama S., Biochim. Biophys. Acta (1998) 1392(1), 1-15; Takahashi et al., PNAS (1999) 96(20), 11358-63).

[0008] Various diseases linked to an HDL deficiency, and in particular a deficiency of the active pathway of cholesterol translocation, have been described. These diseases include Tangier disease and familial HDL deficiency (FHD) (Remaley et al., Arterioscl. Thromb. Vasc. Biol (1997) 17(9) 1813-21; Marcil et al., Arterioscl. Thromb. Vasc. Biol. (1999) 19(1), 159-69; Francis et al., (1995) J. Clin. Invest. 96(1), 78-87).

[0009] Tangier disease appears to be linked to a cellular deficiency in the active pathway of cellular cholesterol translocation, which leads to degradation of HDLs and to a disturbance of lipoprotein metabolism. Specifically, particles which do not incorporate cholesterol from the peripheral cells and which cannot be correctly metabolized are rapidly removed from the body. The plasma concentration of circulating HDL of these patients is extremely low and the HDLs no longer, therefore, ensure that the cholesterol is returned to the liver. The excess cholesterol accumulated in the peripheral cells and tissues causes characteristic clinical signs such as the formation of orange-colored tonsils (Serfaty-Lacrosniere et al., (1994) Athérosclerosis 107(1) 85-98).

[0010] The familial disorders linked to HDL metabolism are also characterized by a low concentration of HDL particles, and are most commonly detected in patients suffering from coronary diseases (Marcil et al., The Lancet (1999) 354(9187), 1341-6). This cardioprotective effect of HDL is probably explained by its involvement in the transport of cholesterol from the peripheral tissues toward the liver (Bruce et al., Annu. Rev. Nutr. (1998) 18, 297-3130).

[0011] The product of the ABCA1 gene plays a role in the regulation of the cellular metabolism of cholesterol and in the reverse transport of cholesterol and of phospholipids. In this respect, it has recently been demonstrated that the ABCA1 gene is a key gene in the active pathway of cholesterol translocation from cells to HDLs. Specifically, it has been observed that the ABCA1 transporter is mutated in patients in which the reverse transport of cholesterol is affected and, in particular, in patients suffering both from Tangier disease and from familial HDL deficiency (Lawn et al., J. Clin. Invest. (1999) 104(8) 125-31; Bodzioch et al., Nat. Genet. (1999) 22(4), 347-51; Orso et al., Nat. Genet. (2000) 24(2), 192-6).

[0012] Consequently, the presence of mutations or polymorphisms in the nucleotide sequence of ABCA1 appears to constitute, in the same way as the plasma concentration of HDL, a good risk factor for detecting a coronary disorder.

[0013] The high instance of coronary disease, which is a principal cause of mortality in developed countries, clearly shows the necessity of having tools for detecting allelic polymorphisms of the ABCA1 gene, and compositions, methods and kits which make it possible to diagnose the coronary risks, or a predisposition to a disease, linked to a circulating HDL deficiency, which would be likely to lead to angina pectoris, a myocardial infarction, atherosclerosis or a familial HDL deficiency such as Tangier disease, the symptoms of which are described above.

[0014] The human ABCA1 gene has recently been cloned and characterized and is described in applications PCT/FR00/01595 and EP99402668, and by Santamarina-Fojo et al., PNAS (2000) 97(14), 7987-7992). It has a total size of 149 kb and comprises a 1.453 kb promoter sequence, coding and intron sequences of 146.581 kb and a 1 kb 3′ region. It consists of 50 exons and, therefore, 49 introns. Exon 1 encodes the untranslated 5′ end (5′ UTR) and is followed by a large intron 24.156 kb in length. Exon 2 contains the remaining portion of the 5′ UTR end and encodes the first 21 amino acids of the N-terminal end of the ABCA1 protein. The ABCA1 gene encodes the 2261 amino acid ABCA1 transporter protein. Analysis of the regulatory sequence upstream of the human ABCA1 gene has made it possible to identify a TATA box (TCTATAAAAG) 33 bp upstream of the transcription start site, many binding sites for ubiquitous transcription factors such as SP1, NF-kB, and for activator proteins (AP-1, -2, and -4), and three E-box motifs (5′- CANNTG-3′), and several hepatocyte nuclear factor (HNF)-3 binding sites.

[0015] The applicants have discovered, surprisingly and unexpectedly, a number of polymorphisms in the human gene encoding the ABCA1 transporter. The applicants have, moreover, discovered a statistically significant correlation between the presence of certain allelic polymorphisms of the ABCA1 gene and the predisposition of an individual to develop a coronary pathology, such as a risk of myocardial infarction.

[0016] A subject of the present invention is therefore isolated nucleic acids encoding polymorphic variants of the human ABCA1 transporter, which can be linked to a coronary risk, such as a risk of myocardial infarction, a risk of cardiovascular disorder or more generally any disorder due to an HDL deficiency. A subject of the present invention is also the polymorphic polypeptide sequences of the human ABCA1 transporter, which are produced by the allelic forms of ABCA1. In addition, a subject of the present invention is recombinant vectors comprising these nucleic acids, cells comprising the vectors, and the methods for producing variant polypeptides obtained by cell culture under conditions which allow the expression of these polypeptides.

[0017] According to another aspect, a subject of the present invention is suitable detection means, probes or primers, specific for some of these polymorphisms in the human ABCA1 gene, which can be associated with coronary risks, such as for example a risk of myocardial infarction, or with a particular pharmacological response with respect to a therapeutic molecule. The present invention also relates to a method and kits which make it possible to detect a polymorphic sequence of the in the ABCA1 transporter gene of a human individual, and consists in (i) isolating a DNA sample from said individual, (ii) amplifying the regions containing the ABCA1 gene, (iii) determining the presence or absence of one or more polymorphisms in the amplified DNA region. Such polymorphisms can be linked to other polymorphisms in a polymorphic profile, which is associated with a predisposition to a metabolic disease or disorder.

[0018] Again according to another aspect, the present invention relates to a method which makes it possible to diagnose the risk of a cardiovascular disorder in a patient. The method consists in comparing two polymorphic profiles. The first profile is that of the patient the testing of whom is desired, and the second is a reference polymorphic profile which is derived from a population of control individuals with a predetermined cardiovascular or coronary risk such as, for example, a risk of myocardial infarction. The comparison between the test and control polymorphic sequences gives a good indication of the risk factor of the individual who has an ABCA1 polymorphic sequence.

[0019] GENERAL DEFINITIONS

[0020] The terms “nucleic acid” or “polynucleotide” refer to polymers containing purine and pyrimidine bases. They are polyribonucleotides, polydeoxyribonucleotides or polyribo-polydeoxyribonucleotide mixed polynucleotides. The nucleic acids comprise single- and double-stranded molecules, of the DNA-DNA, DNA-RNA, and RNA type, or protein nucleic acids (PNAs) formed by the conjugation of bases to an amino acid backbone. Nucleic acids also include molecules comprising modified bases and synthetic analogs of phosphodiester bonds, such as phosphorothioates and thioesters. The term “nucleic acid”, in particular DNA and RNA molecules, refers only to a primary or secondary structure of the molecule, and is not limited by a specific tertiary configuration. Consequently, the term includes double-stranded DNA, which includes, inter alia, linear or circular DNA molecules (including restriction fragments), plasmids and chromosomes. The structure of the double-stranded DNA molecules are described using the conventional direction, i.e., 5′->3′ of the nontranscribed strand of the DNA or sense strand (having a sequence homologous to the mRNA). A recombinant DNA molecule is a DNA molecule which has been subjected to molecular biological manipulations.

[0021] For the purposes of the present invention, the term an “isolated” nucleic acid or polypeptide is intended to mean a nucleic acid or polypeptide which has been removed from its environment of natural origin. An isolated nucleic acid or polypeptide contains less than approximately 50%, preferably less than 75%, and even more preferably less than 90% of cellular components.

[0022] A “derived” nucleic acid or polypeptide sequence corresponds to a region of a specific designated sequence, and includes, for the nucleic acids, the sequences which are identical or complementary.

[0023] For the purposes of the present invention, the expression “nucleotide sequence” can be used to designate either a polynucleotide or a nucleic acid, encompassing the genetic material itself, and is not, therefore, restricted to the information contained in the sequence.

[0024] For the purposes of the present invention, the term “oligonucleotide” refers to a nucleic acid which comprises generally at least 10, preferably 15, and more preferably at least 20 nucleotides, and which is capable of hybridizing to a genomic DNA molecule, to an mRNA or to a cDNA, or any other molecule of interest. Oligonucleotides can be labeled, for example with ³²P nucleotides or nucleotides to which are attached, by covalent bonding, a fluorescent label or a label such as biotin.

[0025] An oligonucleotide can be a probe capable of detecting the presence of a nucleic acid. Alternatively, the oligonucleotide can be a PCR primer, and can be used for cloning the complete sequence, or a fragment, of a gene of interest. An oligonucleotide can also form a triple helix with a double-stranded sequence of interest on a DNA molecule. Finally, an oligonucleotide library can be attached to a solid support in order to detect various polymorphisms of interest. Generally, oligonucleotides are synthetic and may comprise phosphodiester bonds or thioester bonds.

[0026] The term “probe” refers to a nucleic acid or to an oligonucleotide, capable of hybridizing to a sequence on a target nucleic acid due to the complementarity of at least a portion of the probe with a sequence of the target nucleic acid. Probes are generally labeled in order to be detectable after hybridization.

[0027] A nucleic acid molecule hybridizes to a nucleic acid molecule, such as a cDNA, a genomic DNA or an RNA, when the single-stranded form of the nucleic acid molecule can stabilize with another single-stranded nucleic acid molecule according to the appropriate conditions of temperature and ionic strength of the hybridization solution (Sambrook et al. 1989, Molecular Cloning: A Laboratory Manual, Second Edition, Cold Spring Harbor Laboratory Press: Cold Spring Harbor, N.Y.). The conditions of temperature and of ionic strength determine the stringency of the hybridization.

[0028] For preliminary screening of homologous nucleic acids, low stringency conditions (temperature equal to 55° C., 5×SSC containing 0.1% SDS, 0.25% milk, without formamide; or 30% formamide, 5×SSC containing 0.5% SDS) are used.

[0029] For moderate stringency hybridization conditions, a higher temperature is used, with 50% of formamide and 5×or 6×SSC. Although the hybridization reaction requires the nucleic acids to be complementary, mismatches between the bases are acceptable. The stringency suitable for the hybridization of a pair of nucleic acids depends on the length of the nucleic acids and on the degree of complementarity, which are variables well known in molecular biology. The greater the degree of similarity and of homology between two nucleotide sequences, the more a high hybridization temperature can be used. For hybrids with a size greater than about 100 nucleotides, the hybridization temperature is calculated using the equations described in Sambrook et al. For the hybridization of nucleic acids smaller in size, such as oligonucleotides, the position of the mismatches is important, and the length of the oligonucleotide determines its specificity. An oligonucleotide has, in general, a minimum length of 10 nucleotides, preferably at least 15 nucleotides, and even more preferably 20 nucleotides.

[0030] For high stringency hybridization conditions, the following conditions are used:

[0031] 1- Competition of membranes and PREHYBRIDIZATION:

[0032] Mix: 40 μl of salmon sperm DNA (10 mg/ml)

[0033] +40 μl of human placental DNA (10 mg/ml)

[0034] Denature for 5 min at 96° C., then plunge the mixture into ice.

[0035] Remove the 2×SSC buffer and pour 4 ml of formamide mix into the hybridization tube containing the membranes.

[0036] Add the mixture of the two denatured DNAs.

[0037] Incubate at 42° C. for 5 to 6 hours, with rotation.

[0038] 2- Competition of the labeled probe:

[0039] Add 10 to 50 μl of Cot I DNA, depending on the amount of nonspecific hybridization, to the labeled and purified probe.

[0040] Denature for 7 to 10 min at 95° C.

[0041] Incubate at 65° C. for 2 to 5 hours.

[0042] 3- Hybridization:

[0043] Remove the prehybridization mix.

[0044] Mix 40 μl of salmon sperm DNA +40 μl of human placental DNA; denature for 5 min at 96° C., then plunge into ice.

[0045] Add 4 ml of formamide mix, the mixture of the two DNAs and the labeled probe/denatured Cot I DNA to the hybridization tube.

[0046] Incubate for 15 to 20 hours at 42° C., with rotation.

[0047] 4- Washes:

[0048] One wash at room temperature in 2×SSC, to rinse.

[0049] Twice 5 minutes at room temperature, 2×SSC and 0.1% SDS

[0050] Twice 15 minutes, 0.1×SSC and 0.1% SDS, at 65° C.

[0051] Wrap the membranes in Saran wrap and expose to photographic emulsion.

[0052] The hybridization conditions described above are suitable for the hybridization, under high stringency conditions, of a nucleic acid molecule with a length which can range from 20 nucleotides to several hundreds of nucleotides.

[0053] The suitable hybridization conditions can, for example, be adjusted according to the teaching contained in the book by HAMES and HIGGINS (Eds., (1985) Nuclecic Acid hybridization, a practical approach, IRL Press, Oxford) or in the book by AUSUBEL et al (Current Protocols in Molecular Biology, Green Publishing Associates and Wiley Interscience, N.Y.).

[0054] A “gene” refers to a nucleic acid sequence corresponding to a sequnce present in the genome which comprises (i) the coding region, which comprises exons, introns and sequences at the junction between the exons and the introns,and (ii) regulatory sequences in 5′ and 3′ of the coding region.

[0055] The term “ABCA1 transporter” is intended to mean the ABCA1 transporter protein encoded by the cDNA of nucleotide sequence SEQ ID NO: 1 (FIG. 1), and the peptide sequence SEQ ID NO: 2 (FIG. 2). In addition, several partial genomic nucleotide sequences of the ABCA1 gene have been isolated and characterized, these genomic sequences comprise both exon sequences and intron sequences. Some of these partial genomic sequences are given in Table 1, below.

TABLE 1
Partial genomic sequences of the human ABC1 gene

| SEQ ID NO | Designation |
|---|---|
| 3 | Promoter (p), exon 1a, intron 1a(p) |
| 4 | Intron 1a(p), exon 1b, intron 1b(p) |
| 5 | Intron 1b(p), exon 2, intron 2, exon 3, |
| | intron 3, exon 4, intron 4(p) |
| 6 | Intron 4(p), exon 5, intron 5(p) |
| 7 | Intron 5(p), exon 6, intron 6(p) |
| 8 | Intron 7(p), exon 8, intron 8(p) |
| 9 | Intron 8(p), exon 9, intron 9, exon 10, |
| | intron 10(p) |
| 10 | Intron 11(p), exon 12, intron 12, exon 13, |
| | intron 13, exon 14, intron 14, exon 15, |
| | intron 15, exon 16, intron 16, exon 17, |
| | intron 17(p) |
| 11 | Intron 17(p), exon 18, intron 18(p) |
| 12 | Intron 18(p), exon 19, intron 19(p) |
| 13 | Intron 19(p), exon 20, intron 20, exon 21, |
| | intron 21, exon 22, intron 22, exon 23, |
| | intron 23, exon 24, intron 24, exon 25, |
| | intron 25, exon 26, intron 26(p) |
| 14 | Intron 26(p), exon 27, intron 27, exon 28, |
| | intron 28, exon 29, intron 29, exon 30, |
| | intron 30(p) |
| 15 | Intron 30(p), exon 31, intron 31, exon 32, |
| | intron 32, exon 33, intron 33, exon 34, |
| | intron 34(p) |
| 16 | Intron 35(p), exon 36, intron 36(p) |
| 17 | Intron 36(p), exon 37, intron 37, exon 38, |
| | intron 38(p) |
| 18 | Intron 38(p), exon 39, Intron 39(p) |
| 19 | Intron 39(p), exon 40, intron 40, exon 41, |
| | intron 41(p) |
| 20 | Intron 44(p), exon 45, intron 45(p) |
| 21 | Intron 45(p), exon 46, intron 46, exon 47, |
| | intron 47(p) |
| 22 | Intron 48(p), exon 49, sequence in 3′ of last exon |

[0056] The expression “single nucleotide polymorphism” or “SNP” is intended to mean the substitution, insertion or deletion of a single nucleotide in the nucleotide sequence of a gene, among several individuals. When the polymorphism is in the form of an insertion or of a deletion, it may be an insertion or a deletion of one or more nucleotides at one position of a gene. The various nucleotide sequences of the same gene that result from such polymorphisms are alleles.

[0057] A “polymorphic position” is a predetermined position in the sequence of agene which comprises a SNP. In certain cases, genetic polymorphisms cause a variation in the amino acid sequence and, therefore, from a polymorphic position can result in a polymorphism in the amino acid sequence at a predetermined position of the sequence of the polypeptide. An individual homozygous for a specific polymorphism carries, on the two copies of the same gene, the same polymorphic sequence at the same position. An individual heterozygous for a specific polymorphism carries, on the two copies of the gene, sequences which are different at the polymorphic position.

[0058] The term “polymorphic profile” is intended to mean one or more single nucleotide polymorphisms, which can be present on the sequence of a single gene or of a plurality of genes. A simple polymorphic profile comprises a SNP in a single position of one or two alleles of an individual (allelic polymorphism). A test polymorphic profile corresponds to the characteristic polymorphism of an individual who is diagnosed, for example, with a predisposition to a disease associated with a deficiency of the ABCA1 gene, such as a metabolic deficiency of the FHD type or a cardiovascular disorder, or a risk of a myocardial infarction. The reference or control polymorphic profile was determined by statistically significant correlation of the profiles in a population of individuals who exhibit a coronary risk.

[0059] POLYMORPHISMS OF THE ABCA1 GENE

[0060] The present invention is based on the discovery of 90 polymorphisms in the sequence of the human ABCA1 gene, as represented in the sequences SEQ ID NOS: 3-22, of which 22 SNPs are found in the promoter sequence upstream of the human ABCA1 gene of SEQ ID NO: 23. Some SNPs according to the present invention lead to structural modifications in the polypeptide sequence of the human ABCA1 transporter protein represented in SEQ ID NO: 2.

[0061] For the identification and characterization of ABCA1 polymorphic DNA, polymerase chain reactions (PCRs) were carried out in order to amplify the ABCA1 sequences from human genomic DNA originating from three different ethnic groups, namely, a Caucasian population, a Japanese population and/or an African population. The PCR products were sequenced, and the sequences were compared with one another and with the reference sequences SEQ ID NOS: 3-23.

[0062] Table 2 gives the allelic polymorphisms in the exons and introns of the human ABCA1 gene according to the present invention. It indicates in particular the polymorphic position in each of the exons with respect to the first nucleotide of the reference exon, and in each of the introns with respect to the 3′ end or upstream of the 5′ end of the closest exon, the 5′ and 3′ sequences on either side of the polymorphic position, and the frequency of appearance of the polymorphism in the three populations tested, African, Caucasian and Japanese. In cases in which these frequencies could not be determined, “n.d.” is indicated. Some polymorphisms cause structural modifications in the peptide sequence of the human ABCA1 transporter protein, and, more precisely, cause the substitution of one amino acid with another (MIS). Other polymorphisms in the exon sequences are termed “silent” (SIL), the ABCA1 protein sequence remaining unchanged. Finally, when the polymorphism is located in an intron or in a noncoding exon, the polymorphic sequence is termed “noncoding” (NCD). The polymorphisms identified in the various exons and introns of the ABCA1 gene are described in detail below.

TABLE 2
Allelic Polymorphisms In The Exon And Introns Of The Human ABCA1 Gene

| | | | | | | | | Pro- | | Frequency In The Population | | |
|---|---|---|---|---|---|---|---|---|---|---|---|---|
| | Intron/ | Posi- | | Allele | Allele | | | tein | | | Cau- | |
| Name | Exon | tion | 5′-Sequence | 1 | 2 | 3′-Sequence | Type | Change | Codon | African | casian | Japanese |
| s-35e1a | Exon 1a | 35 | GGCCGGGACC | C | G | GCAGAGCCGA | NCD | | 0 | 0.00% | 4.84% | 0.00% |
| s-16e1b | Exon 1b | 16 | GACCAGCCAC | — | G | GGCGTCCCTG | NCD | | 0 | 0.00% | 10.94 | 27.42% |
| s-76e1b | Exon 1b | 76 | ACACGCTGGG | G | C | GTGCTGGCTG | NCD | | 0 | 0.00% | 370.00% | 15.00% |
| s-m39i3 | Intron | −39 | GGCAGTTGGC | C | A | TAGCTAAAGC | NCD | | 0 | 21.67% | 0.00% | 0.00% |
| | 3 | | | | | | | | | | | |
| s-25i4 | Intron | 25 | TCTCTGCATC | C | T | GTTGAGAATG | NCD | | 0 | 6.90% | 0.00% | 0.00% |
| | 4 | | | | | | | | | | | |
| s-53e5 | Exon 5 | 53 | CTGGGTTCCT | G | A | TATCACAACC | SIL | | 0 | 36.67% | 26.56% | 62.90% |
| s-108e6 | Exon 6 | 108 | TTTGTGGCCT | A | G | CCAAGGGAGA | SIL | | 217 | 3.45% | 0.00% | 0.00% |
| s-113e6 | Exon 6 | 113 | GGCCTACCAA | G | A | GGAGAAACTG | MIS | R>K | 219 | 61.67% | 20.37% | 46.55% |
| s-m14i7 | Intron | −14 | TTCTGTCCCC | — | A | ATCCCTGACG | NCD | | 0 | 16.67% | 12.07% | 63.33% |
| | 7 | | | | | | | | | | | |
| s-123e8 | Exon 8 | 123 | GCGGGCATCC | C | T | GAGGGAGGGG | SIL | | 312 | 12.07% | 6.67% | 10.34% |
| s-135e8 | Exon 8 | 135 | AGGGAGGGGG | G | A | CTGAAGATCA | SIL | | 316 | 32.76% | 15.00% | 6.90% |
| s-m89i8 | Intron | −89 | TGGGGTTTCA | A | G | CTAAGAACTC | NCD | | 0 | 23.33% | 0.00% | 0.00% |
| | 8 | | | | | | | | | | | |
| s-m104i9 | Intron | −104 | GAGGACTGGC | A | G | CAGGGCTGCT | NCD | | 0 | n.d. | 14.81% | 28.85% |
| | 9 | | | | | | | | | | | |
| s-m61i9 | Intron | −61 | AGGAGCCAAA | — | G | CGCTCATTGT | NCD | | 0 | n.d. | 39.58% | 0.00% |
| | 9 | | | | | | | | | | | |
| s-m41i9 | Intron | −41 | GTCTGTGCTT | CTC | - - - | CTCCTTTTTC | NCD | | 0 | n.d. | 16.00% | 0.00% |
| | 9 | | | | | | | | | | | |
| s-m13i9 | Intron | −13 | CCTGGCTCCC | C | T | ACCTGACTCC | NCD | | 0 | n.d. | 8.00% | 42.86% |
| | 9 | | | | | | | | | | | |
| s-126e12 | Exon 12 | 126 | CTCCAGGCAG | C | T | AATTGAGCTG | SIL | | 545 | 9.26% | 0.00% | 0.00% |
| s-m29i12 | Intron | −29 | TTCTAAAGGA | A | G | TGGTTGATTA | NCD | | 0 | 6.00% | 0.00% | 0.00% |
| | 12 | | | | | | | | | | | |
| s-24i13 | Intron | 24 | AAGCCACTGT | T | A | TTTAACCAGT | NCD | | 0 | 5.36% | 26.56% | 12.90% |
| | 13 | | | | | | | | | | | |
| s-m59i13 | Intron | −59 | GGCCTTGGCC | C | T | ATCACCCTGG | NCD | | 0 | 0.00% | 7.81% | 34.38% |
| | 13 | | | | | | | | | | | |
| s-148e14 | Exon 14 | 148 | ACAACAGCAT | C | A | CTCTGGTTTA | SIL | | 680 | 50.00% | 13.46% | 71.88% |
| s-81i14 | Intron | 81 | AAGAAGAAAA | G | A | AAATCCAAGC | NCD | | 0 | 0.00% | 0.00% | 32.81% |
| | 14 | | | | | | | | | | | |
| s-115i14 | Intron | 115 | GGGGTCATAC | C | A | TGTCATTTCC | NCD | | 0 | 0.00% | 0.00% | 34.38% |
| | 14 | | | | | | | | | | | |
| s-196e15 | Exon 15 | 196 | GCAGGACTAC | G | A | TGGGCTTCAC | MIS | V>M | 771 | 5.36% | 1.72% | 6.67% |
| s-136e16 | Exon 16 | 136 | CACCACTTCG | G | A | TCTCCATGAT | MIS | V>I | 825 | 0.00% | 6.25% | 37.50% |
| s-27e17 | Exon 17 | 27 | CAGGCCCTGG | T | C | ATTTTCCTTG | MIS | Y>P | 857 | 0.00% | 11.11% | 0.00% |
| s-107e17 | Exon 17 | 107 | AGAAGAGAAT | A | G | TCAGAAAGTA | MIS | I>M | 883 | 45.65% | 12.90% | 71.43% |
| s-60i17 | Intron | 60 | CTGCTAACTG | T | C | TGGGGGCAAG | NCD | | 0 | 10.87% | 0.00% | 0.00% |
| | 17 | | | | | | | | | | | |
| s-m68i17 | Intron | −68 | AGCGCAGTGC | C | G | CTGTGTCCTT | NCD | | 0 | 0.00% | 8.33% | 32.81% |
| | 17 | | | | | | | | | | | |
| s-4e18 | Exon 18 | 4 | GTCACAGTCT | G | T | CATGGAGGAG | MIS | C>F | 887 | 0.00% | 0.00% | 3.13% |
| s-40e19 | Exon 19 | 40 | CCTCGGGCAC | C | T | GCCTACATCC | SIL | | 956 | 0.00% | 0.00% | 4.35% |
| s-18i19 | Intron | 18 | CCAGCAGCAC | G | A | TTAAGAATAG | NCD | | 0 | 15.79% | 0.00% | 0.00% |
| | 19 | | | | | | | | | | | |
| s-m10i19 | Intron | −10 | ACCTGCCTCC | C | T | TGTCCCCAGG | NCD | | 0 | 4.55% | 0.00% | 0.00% |
| | 19 | | | | | | | | | | | |
| s-123e22 | Exon 22 | 123 | GAAGAACCAG | C | T | TGGGAACAGG | MIS | L>C | 1122 | 29.31% | 0.00% | 0.00% |
| s-m65i22 | Intron | −65 | CCTCCCCGGC | G | A | AAGGTGCTGG | NCD | | 0 | 0.00% | 6.45% | n.d. |
| | 22 | | | | | | | | | | | |
| s-54e23 | Exon 23 | 54 | GCGACCATGA | G | C | AGTGACACGC | MIS | E>D | 1172 | 7.14% | 4.84% | n.d. |
| s-149i23 | Exon 23 | 149 | GGTGTGGGAG | C | T | AGCTTGGTGG | NCD | | 0 | 7.14% | 0.00% | n.d. |
| s-m50i23 | Intron | −50 | GCCCTCACTC | C | T | GAAGCCCCTC | NCD | | 0 | 3.45% | 0.00% | 0.00% |
| | 23 | | | | | | | | | | | |
| s-98e24 | Exon 24 | 98 | TGCCATATGA | A | G | GCTGCTAAGG | SIL | | 1211 | 3.45% | 0.00% | 0.00% |
| s-149e24 | Exon 24 | 149 | TTGATGACCG | G | A | CTCTCAGACC | SIL | | 1228 | 18.97% | 0.00% | 0.00% |
| s-44e27 | Exon 27 | 44 | ATGGCAAAGG | G | A | TCCTACCAGG | SIL | | 1315 | 11.54% | 0.00% | n.d. |
| s-7e30 | Exon 30 | 7 | GCAGAGACAC | G | A | CCCTGCCAGG | SIL | | 1427 | 3.45% | 12.50% | 34.48% |
| s-166e30 | Exon 30 | 166 | GTCCCCCAGG | G | T | GCAGGGGGGC | SIL | | 1480 | 6.90% | 0.00% | 0.00% |
| s-30i31 | Intron | 30 | GGCCCCTGCC | T | G | TATTATTACT | NCD | | 0 | 13.79% | 12.50% | 0.00% |
| | 31 | | | | | | | | | | | |
| s-m142i32 | Intron | −142 | AGGAAGCTGA | C | T | GTGTAACTTC | NCD | | 0 | 5.36% | 0.00% | 0.00% |
| | 32 | | | | | | | | | | | |
| s-m130i32 | Intron | −130 | TGTAACTTCT | -- | CT | GAGGCAAAAT | NCD | | 0 | 0.00% | 26.79% | 40.00% |
| | 32 | | | | | | | | | | | |
| s-m26i32 | Intron | −26 | CACTGTCTGG | G | C | TTTTAATGTC | NCD | | 0 | 3.57% | 8.93% | 18.33% |
| | 32 | | | | | | | | | | | |
| s-m74i33 | Intron | −74 | CCTGTTGTCC | T | A | CAGGTTCCAG | NCD | | 0 | 3.45% | 0.00% | 0.00% |
| | 33 | | | | | | | | | | | |
| s-62e34 | Exon 34 | 62 | CTGGACACCA | G | A | AAATAATGTC | NIS | R>K | 1587 | 93.10% | 26.67% | 57.14% |
| s-77e36 | Exon 36 | 77 | CAGCTTTGTC | G | A | TATTCCTGAT | NIS | V>I | 1674 | 0.00% | 0.00% | 3.33% |
| s-55i36 | Intron | 55 | CATGGATTGA | T | C | ATGGATAAGA | NCD | | 0 | 24.14% | 0.00% | 0.00% |
| | 36 | | | | | | | | | | | |
| s-64e38 | Exon 38 | 64 | GCACAGCCTA | T | C | GTGGTGCTCA | SIL | | 1767 | 4.00% | 0.00% | n.d. |
| s-251i39 | Intron | 251 | GAAAATAGTG | T | G | TATTTGCTTG | NCD | | 0 | n.d. | 24.14% | 46.55% |
| | 39 | | | | | | | | | | | |
| s-252i39 | Intron | 252 | AAAATAGTGT | T | C | ATTTGCTTGG | NCD | | 0 | n.d. | 24.14% | 44.83% |
| | 39 | | | | | | | | | | | |
| s-m119i40 | Intron | −119 | ATCCCGCAGC | C | T | CCCTCCCTGC | NCD | | 0 | 0.00% | 0.00% | 25.00% |
| | 40 | | | | | | | | | | | |
| s-m69i44 | Intron | −69 | CTTTCATACA | T | C | GTATGTGTAG | NCD | | 0 | 5.17% | 0.00% | n.d. |
| | 44 | | | | | | | | | | | |
| s-114e45 | Exon 45 | 114 | CTTTGATCGG | C | T | GGGCCTCCTG | SIL | | 2061 | 22.41% | 0.00% | n.d. |
| s-m34i45 | Intron | −34 | TTTTTTCCCC | C | T | CAGCAAATAA | NCD | | 0 | n.d. | 5.17% | 0.00% |
| | 45 | | | | | | | | | | | |
| s-13i47 | Intron | 13 | AATAAAGATA | A | G | TTTCTTTGGG | NCD | | 0 | 0.00% | 11.67% | 42.86% |
| | 47 | | | | | | | | | | | |
| s-86i47 | Intron | 86 | GTGCCTCTAA | A | C | ATAAAGGGAA | NCD | | 0 | 1.72% | 13.33% | 0.00% |
| | 47 | | | | | | | | | | | |
| s-377e49 | Exon 49 | 377 | GACTTGAATT | T | C | AGTTTTTTAC | NCD | | 0 | 3.33% | 0.00% | 0.00% |
| s-833e49 | Exon 49 | 833 | TGGGTGTCTC | C | T | AGGCACGGGA | NCD | | 0 | 54.55% | 35.00% | 18.97% |
| s-1580e49 | Exon49 | 1580 | TGTAACAATA | C | T | TGGGCAGCCT | NCD | | 0 | 0.00% | 30.65% | 0.00% |
| s-1791e49 | Exon49 | 1791 | AGTCTCAAAT | A | T | TTTCATCTCT | NCD | | 0 | 15.79% | 0.00% | 0.00% |
| s-2034e49 | Exon49 | 2034 | ACTTTTTCCA | A | G | AATTTGAATA | NCD | | 0 | 3.33% | 12.90% | 22.22% |
| s-2049e49 | Exon 49 | 2049 | TGAATATTAA | C | T | GCTAAAGGTG | NCD | | 0 | 30.00% | 0.00% | 24.14% |
| s-2449e49 | Exon 49 | 2449 | AAGAAAACAC | A | G | ACATTTTAAT | NCD | | 0 | 16.67% | 20.00% | 23.33% |
| s-2843e49 | Exon 49 | 2843 | TTCATTATCT | G | A | TACTGAAAGC | NCD | | 0 | 7.69% | 0.00% | 0.00% |

[0063] Mutation in exon 1a

[0064] The mutation s-35e1a consists of the substitution of a cytosine (C) with a guanine (G) at position 35 of exon 1a, i.e., at position 2928 with respect to the sequence SEQ ID NO: 3. The exon 1a carrying this polymorphism has the nucleotide sequence SEQ ID NO: 24. The cDNA carrying the polymorphism in exon 1a of the ABCA1 gene is represented by the nucleotide sequence SEQ ID NO: 92.

[0065] Mutations in exon 1b

[0066] A first mutation is designated s-16e1b and consists of the insertion of a guanine (G) at position 16 of exon 1b, i.e., at position 115 with respect to the sequence SEQ ID NO: 4. The exon 1b carrying this polymorphism has the nucleotide sequence SEQ ID NO: 25. The cDNA carrying the polymorphism in exon 1b of the ABCA1 gene is represented by the nucleotide sequence SEQ ID NO: 93.

[0067] A second mutation designated s-76e1b consists of the substitution of a guanine (G) with a cytosine (C) at position 76 of exon 1b, i.e., at position 175 with respect to the sequence SEQ ID NO: 4. The exon 1b carrying this polymorphism has the nucleotide sequence SEQ ID NO: 26. The cDNA carrying the polymorphism in exon 1b of the ABCA1 gene is represented by the nucleotide sequence SEQ ID NO: 94.

[0068] Mutation in intron 3

[0069] The mutation s-m39i3 consists of the substitution of a cytosine (C) to to an adenine (A) [lacuna] position −39 of the 3′ end of intron 3, i.e., at position 10646 with respect to the sequence SEQ ID NO: 5. The nucleotide sequence of the intron 3 carrying this polymorphism is represented in the sequence SEQ ID NO: 27.

[0070] Mutation in intron 4

[0071] The mutation s-25i4 consists of the substitution of a cytosine (C) to a thymidine (T) [lacuna] position 25 of the 5′ end of intron 4, i.e., at position 10828 with respect to the sequence SEQ ID NO: 5. The partial nucleotide sequence of the intron 4 carrying this polymorphism is represented in the sequence SEQ ID NO: 28.

[0072] Mutation in exon 5

[0073] The mutation s-53e5 consists of the substitution of a guanine (G) to an adenine (A) at position 53 of exon 5, i.e., at position 306 with respect to the sequence SEQ ID NO: 6. The exon 5 carrying this polymorphism has the nucleotide sequence SEQ ID NO: 29. The cDNA carrying the polymorphism in exon 5 of the ABCA1 gene is represented by the nucleotide sequence SEQ IN NO: 95.

[0074] Mutations in exon 6

[0075] The mutation designated s-108e6 consists of the substitution of an adenine (A) to a guanine (G) at position 108 of exon 6, i.e., at position 268 with respect to the sequence SEQ ID NO: 7. The exon 6 carrying this polymorphism has the nucleotide sequence SEQ ID NO: 30. The cDNA carrying the polymorphism in exon 6 of the ABCA1 gene is represented by the nucleotide sequence SEQ ID NO: 96.

[0076] The mutation s-113e6 consists of the substitution of a guanine (G) to an adenine (A) at position 113 of exon 6, i.e., at position 273 with respect to the sequence SEQ ID NO: 7. The sequence of exon 6 of the ABCA1 gene carrying this polymorphism is the polynucleotide of sequence SEQ ID NO: 31. The mutated cDNA carrying the polymorphism in exon 6 is represented in the nucleotide sequence SEQ ID NO: 97, encodes a variant ABCA1 polypeptide 2261 amino acids in length, of sequence SEQ ID NO: 127.

[0077] Mutation in intron 7

[0078] The mutation s-m14i7 consists of the insertion of an adenine (A) at position -14 upstream of the 3′ end of intron 7, i.e., at position 589 with respect to the sequence SEQ ID NO: 8. The partial nucleotide sequence of the intron 7 carrying this polymorphism is represented in the sequence SEQ ID NO: 32.

[0079] Mutations in exon 8

[0080] The mutation s-123e8 consists of the substitution of a cytosine (C) with a thymine (T) at position 123 of exon 8, i.e., at position 726 with respect to the sequence SEQ ID NO: 8. The exon 8 carrying this polymorphism has the nucleotide sequence SEQ ID NO: 33. The cDNA carrying the polymorphism in exon 8 of the ABCA1 gene is represented by the nucleotide sequence SEQ ID NO: 98.

[0081] The mutation s-135e8 consists of the substitution of a guanine (G) with an adenine (A) at position 135 of exon 8, i.e., at position 738 with respect to the sequence SEQ ID NO: 8. The exon 8 carrying this polymorphism has the nucleotide sequence SEQ ID NO: 34. The cDNA carrying the polymorphism in exon 8 of the ABCA1 gene is represented by the nucleotide sequence SEQ ID NO: 99.

[0082] Mutation in intron 8

[0083] The mutation s-m89i8 consists of the substitution of an adenine (A) with a guanine (G) at position -89 upstream of the 3′ end of intron 8, i.e., at position 525 with respect to the sequence SEQ ID NO: 9. The partial nucleotide sequence of the intron 8 carrying this polymorphism is represented in the nucleotide sequence SEQ ID NO: 35.

[0084] Mutations in intron 9

[0085] The mutation s-m104i9 consists of the substitution of an adenine (A) with a guanine (G) at position −104 upstream of the 3′ end of intron 9, i.e., at position 981 with respect to the sequence SEQ ID NO: 9. The partial nucleotide sequence of the intron 9 carrying this polymorphism is represented in the nucleotide sequence SEQ ID NO: 36.

[0086] The mutation s-m61 i9 consists of an insertion of a guanine (G) at position -61 upstream of the 3′ end of intron 9, i.e., at position 1023 with respect to the sequence SEQ ID NO: 9. The partial nucleotide sequence of the intron 9 carrying this polymorphism is represented in the sequence SEQ ID NO: 37.

[0087] The mutation s-m41 i9 consists of a deletion of a three-nucleotide “CTC” fragment from the nucleotide at position −41 to nucleotide -43 upstream of the 3′ end of intron 9, i.e., at position 1042-4044 with respect to the sequence SEQ ID NO: 9. The partial nucleotide sequence of the intron 9 carrying this polymorphism is represented in the nucleotide sequence SEQ ID NO: 38.

[0088] The mutation s-m13i9 consists of the substitution of a cytosine (C) with a thymine (T) at position -13 upstream of the 3′ end of intron 9, i.e., at position 1072 with respect to the sequence SEQ ID NO: 9. The partial nucleotide sequence of the intron 9 carrying this polymorphism is represented in the nucleotide sequence SEQ ID NO: 39.

[0089] Mutation in exon 12

[0090] The mutation s-126e12 consists of the substitution of a cytosine (C) to a thymine (T) at position 126 of exon 12, i.e., at position 765 with respect to the sequence SEQ ID NO: 10. The exon 12 carrying this polymorphism has the nucleotide sequence SEQ ID NO: 40. The cDNA carrying the polymorphism in exon 12 of the ABCA1 gene is represented by the nucleotide sequence SEQ ID NO: 100.

[0091] Mutation in intron 12

[0092] The mutation s-m29i12 consists of the substitution of an adenine (A) with a guanine (G) at position −29 upstream of the 3′ end of intron 12, i.e., at position 1337 with respect to the sequence SEQ ID NO: 10. The nucleotide sequence of the intron 12 carrying this polymorphism is represented in the sequence SEQ ID NO: 41.

[0093] Mutations in intron 13

[0094] The mutation s-24i1 3 consists of the substitution of a thymine (T) with an adenine (A) at position 24 of the 5′ end of intron 13, i.e., at position 1566 with respect to the sequence SEQ ID NO: 10. The nucleotide sequence of the intron 13 carrying this polymorphism is represented in the nucleotide sequence SEQ ID NO: 42.

[0095] The mutation s-m59i1 3 consists of the substitution of a cytosine (C) with a thymine (T) at position −59 upstream of the 3′ end of intron 13, i.e., at position 3270 with respect to the sequence SEQ ID NO: 10. The nucleotide sequence of the intron 13 carrying this polymorphism has the sequence SEQ ID NO: 43.

[0096] Mutation in exon 14

[0097] The mutation s-148e14 consists of the substitution of a cytosine (C) with an adenine (A) at position 148 of exon 14, i.e., at position 3476 with respect to the sequence SEQ ID NO: 10. The exon 14 carrying this polymorphism has the nucleotide sequence SEQ ID NO: 44. The cDNA carrying the polymorphism in exon 14 of the ABCA1 gene is represented by the nucleotide sequence SEQ ID NO: 101.

[0098] Mutations in intron 14

[0099] The mutation s-81i14 consists of the substitution of a guanine (G) with an adenine (A) at position 81 of the 5′ end of intron 14, i.e., at position 3632 with respect to the sequence SEQ ID NO: 10. The nucleotide sequence of the intron 14 carrying this polymorphism is represented in the sequence SEQ ID NO: 45.

[0100] The mutation s-115i14 consists of the substitution of a cytosine (C) with an adenine (A) at position 115 of the 5′ end of intron 14, i.e., at position 3666 with respect to the sequence SEQ ID NO: 10. The intron 14 carrying this polymorphism has the nucleotide sequence SEQ ID NO: 46.

[0101] Mutation in exon 15

[0102] The mutation s-196e15 consists of the substitution of a guanine (G) with an adenine (A) at position 196 of exon 15, i.e., at position 5492 with respect to the sequence SEQ ID NO: 10. The exon 15 carrying this polymorphism has the nucleotide sequence SEQ ID NO: 47. The cDNA carrying the polymorphism in exon 15 of the ABCA1 gene is represented by the nucleotide sequence SEQ ID NO: 102 and encodes a mutated ABCA1 protein SEQ ID NO: 128 in which a valine (V) is substituted with a methionine (M) at position 771.

[0103] Mutation in exon 16

[0104] The mutation s-136e16 consists of the substitution of a guanine (G) with an adenine (A)at position 136 of exon 16, i.e., at position 6714 with respect to the sequence SEQ ID NO: 10. The exon 16 carrying this polymorphism has the nucleotide sequence SEQ ID NO: 48. The cDNA carrying the polymorphism in exon 16 of the ABCA1 gene is represented by the nucleotide sequence SEQ ID NO: 103 and encodes a mutated ABCA1 protein of sequence SEQ ID NO: 129, which comprises the substitution of a valine (V) to isoleucine (I) at position 825.

[0105] Mutations in exon 17

[0106] The mutation s-27e17 consists of the substitution of a thymine (T) with a cytosine (C) at position 27 of exon 17, i.e., at position 7914 with respect to the sequence SEQ ID NO: 10. The exon 17 carrying this polymorphism has the nucleotide sequence SEQ ID NO: 49. The cDNA carrying the polymorphism in exon 17 of the ABCA1 gene is represented by the nucleotide sequence SEQ ID NO: 104 and encodes a mutated ABCA1 protein SEQ ID NO: 130 in which a tyrosine (Y) is substituted with a proline (P) at position 857.

[0107] The mutation s-107e17 consists of the substitution of an adenine (A) with a guanine (G) at position 107 of exon 17, i.e., at position 7994 with respect to the sequence SEQ ID NO: 10. The exon 17 carrying this polymorphism has the nucleotide sequence SEQ ID NO: 50. The cDNA carrying the polymorphism in exon 17 of the ABCA1 gene is represented by the nucleotide sequence SEQ ID NO: 105 and encodes a mutated ABCA1 protein SEQ ID NO: 131 in which an isoleucine (I) is substituted with a methionine (M) at position 883.

[0108] Mutations in intron 17

[0109] The mutation s-60i17 consists of the substitution of a thymine (T) with a cytosine (C) at position 60 of the 5′ end of intron 17, i.e., at position 8061 with respect to the sequence SEQ ID NO: 10. The partial nucleotide sequence of the intron 17 carrying this polymorphism is represented in the sequence SEQ ID NO: 51.

[0110] The mutation s-m68i17 consists of the substitution of a cytosine (C) with a guanine (G) at position −68 upstream of the 3′ end of intron 17, i.e., at position 319 with respect to the sequence SEQ ID NO: 11. The partial nucleotide sequence of the intron 17 carrying this polymorphism is represented in the sequence SEQ ID NO: 52.

[0111] Mutation in exon 18

[0112] The mutation s-4e18 consists of the substitution of a guanine (G) with a thymine (T) at position 4 of exon 18, i.e., at position 390 with respect to the sequence SEQ ID NO: 11. The exon 18 carrying this polymorphism has the nucleotide sequence SEQ ID NO: 53. The cDNA carrying the polymorphism in exon 18 of the ABCA1 gene is represented by the nucleotide sequence SEQ ID NO: 106 and encodes a mutated ABCA1 protein SEQ ID NO: 132 in which a cysteine (C) is substituted with a phenylalanine (F) at position 887.

[0113] The mutation s-40e19 consists of the substitution of a cytosine (C) with a thymine (T) at position 40 of exon 19, i.e., at position 943 with respect to the sequence SEQ ID NO: 12. The exon 19 carrying this polymorphism has the nucleotide sequence SEQ ID NO: 54. The cDNA carrying the polymorphism in exon 19 of the ABCA1 gene is represented by the nucleotide sequence SEQ ID NO: 107.

[0114] Mutations in intron 19

[0115] The mutation s-18i19 consists of the substitution of a guanine (G) with an adenine (A) at position 18 of the 5′ end of intron 19, i.e., at position 1053 with respect to the sequence SEQ ID NO: 12. The partial nucleotide sequence of the intron 19 carrying this polymorphism is represented in the sequence SEQ ID NO: 55.

[0116] The mutation s-m10i19 consists of the substitution of a cytosine (C) with a thymine (T) at position −10 upstream of the 3′ end of intron 19, i.e., at position 274 with respect to the sequence SEQ ID NO: 13. The partial nucleotide sequence of the intron 19 carrying this polymorphism is represented in the sequence SEQ ID NO: 56.

[0117] Mutation in exon 22

[0118] The mutation s-123e22 consists of the substitution of a cytosine (C) with a thymine (T) at position 123 of exon 22, i.e., at position 1592 with respect to the sequence SEQ ID NO: 13. The exon 22 carrying this polymorphism has the nucleotide sequence SEQ ID NO: 57. The cDNA carrying the polymorphism in exon 22 of the ABCA1 gene is represented by the nucleotide sequence SEQ ID NO: 108 and encodes a mutated ABCA1 protein SEQ ID NO: 133 in which a leucine (L) is substituted with a cysteine (C) at position 1122.

[0119] Mutation in intron 22

[0120] The mutation s-m65i22 consists of the substitution of a guanine (G) with an adenine (A) at position −65 upstream of the 3′ end of intron 22, i.e., at position 2884 with respect to the sequence SEQ ID NO: 13. The nucleotide sequence of intron 22 carrying this polymorphism is represented in the sequence SEQ ID NO: 58.

[0121] Mutation in exon 23

[0122] The mutation s-54e23 consists of the substitution of a guanine (G) with a cytosine (C) at position 54 of exon 23, i.e., at position 3002 with respect to the sequence SEQ ID NO: 13. The exon 23 carrying this polymorphism has the nucleotide sequence SEQ ID NO: 59. The cDNA carrying the polymorphism in exon 23 of the ABCA1 gene is represented by the nucleotide sequence SEQ ID NO: 109, and encodes a mutated ABCA1 protein SEQ ID NO: 134 in which a glutamic acid (E) is substituted with an aspartic acid (D) at position 1172.

[0123] Mutations in intron 23

[0124] The mutation s-149i23 consists of the substitution of a cytosine (C) with a thymine (T) at position 149 of the 5′ end of intron 23, i.e., at position 3170 with respect to the sequence SEQ ID NO: 13. The nucleotide sequence of the intron 23 carrying this polymorphism is represented in the sequence SEQ ID NO: 60.

[0125] The mutation s-m50i23 consists of the substitution of a cytosine (C) with a thymine (T) at position -50 upstream of the 3′ end of intron 23, i.e., at position 3958 with respect to the sequence SEQ ID NO: 13. The sequence of the intron 23 carrying this polymorphism is represented in the nucleotide sequence SEQ ID NO: 61.

[0126] Mutations in exon 24

[0127] The mutation s-98e24 consists of the substitution of an adenine (A) with a guanine (G) at position 98 of exon 24, i.e., at position 4105 with respect to the sequence SEQ ID NO: 13. The exon 24 carrying this polymorphism has the nucleotide sequence SEQ ID NO: 62. The cDNA corresponding to the mutation in exon 24 of the ABCA1 gene is represented by the nucleotide sequence SEQ ID NO: 110.

[0128] The mutation s-149e24 consists of the substitution of a guanine (G) with an adenine (A) at position 149 of exon 24, i.e., at position 4156 with respect to the sequence SEQ ID NO: 13. The exon 24 carrying this polymorphism has the nucleotide sequence SEQ ID NO: 63. The cDNA carrying the polymorphism in exon 24 of the ABCA1 gene is represented by the nucleotide sequence SEQ ID NO: 111.

[0129] Mutation in exon 27

[0130] The mutation s-44e27 consists of the substitution of a guanine (G) with an adenine (A) at position 44 of exon 27, i.e., at position 604 with respect to the sequence SEQ ID NO: 14. The exon 27 carrying this polymorphism has the nucleotide sequence SEQ ID NO: 64. The cDNA carrying the polymorphism in exon 27 of the ABCA1 gene is represented by the nucleotide sequence SEQ ID NO: 112.

[0131] Mutations in exon 30

[0132] The mutation s-7e30 consists of the substitution of a guanine (G) with an adenine (A) at position 7 of exon 30, i.e., at position 6854 with respect to the sequence SEQ ID NO: 14. The exon 30 carrying this polymorphism has the nucleotide sequence SEQ ID NO: 65. The cDNA carrying the polymorphism in exon 30 of the ABCA1 gene is represented by the nucleotide sequence SEQ ID NO: 113.

[0133] The mutation s-166e30 consists of the substitution of a guanine (G) with a thymine (T) at position 166 of exon 30, i.e., at position 7013 with respect to the sequence SEQ ID NO: 14. The exon 30 carrying this polymorphism has the nucleotide sequence SEQ ID NO: 66. The cDNA corresponding to the mutation in exon 30 of the ABCA1 gene is represented by the nucleotide sequence SEQ ID NO: 114.

[0134] Mutation in intron 31

[0135] The mutation s-30i31 consists of the substitution of a thymine (G) with a guanine (G) at position 30 of the 5′ end of intron 31, i.e., at position 1307 with respect to the sequence SEQ ID NO: 15. The nucleotide sequence of the intron 31 carrying this polymorphism is represented in the sequence SEQ ID NO: 67.

[0136] Mutations in intron 32

[0137] The mutation s-m142i32 consists of the substitution of a cytosine (C) with a thymine (T) at position −142 upstream of the 3′ end of intron 32, i.e., at position 3600 with respect to the sequence SEQ ID NO: 15. The nucleotide sequence of the intron 32 carrying this polymorphism is represented in the sequence SEQ ID NO: 68.

[0138] The mutation s-m130i32 consists of an insertion of two nucleotides at position −130 upstream of the 3′ end of intron 32, i.e., at position 3611 with respect to the sequence SEQ ID NO: 15. The nucleotide sequence of the intron 32 carrying this polymorphism is represented in the nucleotide sequence SEQ ID NO: 69.

[0139] The mutation s-m26i32 consists of the substitution of a guanine (G) with a cytosine (C) at position −26 upstream of the 3′ end of intron 32, i.e., at position 3716 with respect to the sequence SEQ ID NO: 15. The nucleotide sequence of the intron 32 carrying this polymorphism is represented in the nucleotide sequence SEQ ID NO: 70.

[0140] Mutation in intron 33

[0141] The mutation s-m74i33 consists of the substitution of a thymine (T) with an adenine (A) at position −74 upstream of the 3′ end of intron 33, i.e., at position 5247 with respect to the sequence SEQ ID NO: 15. The nucleotide sequence of the intron 33 carrying this polymorphism is represented in the sequence SEQ ID NO: 71.

[0142] Mutation in exon 34

[0143] The mutation s-62e34 consists of the substitution of a guanine (G) with an adenine (A) at position 62 of exon 34, i.e., at position 5382 with respect to the sequence SEQ ID NO: 15. The exon 34 carrying this polymorphism has the nucleotide sequence SEQ ID NO: 72. The cDNA carrying the polymorphism in exon 34 of the ABCA1 gene is represented by the nucleotide sequence SEQ ID NO: 115 and encodes a mutated ABCA1 protein of SEQ ID NO: 135 in which an arginine (R) has been replaced with a lysine (K) at position 1587.

[0144] The analysis of this polymorphism in a CCSMI (case-control study of myocardial infarction) population, which comprises a study of patients having survived a myocardial infarction and of control subjects of caucasian type (Parra et al., Arteriosclerosis and Thrombosis, (1992) 12(6), 701-707), shows that this polymorphism is associated significantly with an increased risk of myocardial infarction (F=18.6 p<0.0001).

[0145] This polymorphism appears, moreover, to be associated with lower mean levels of HDL cholesterol, and of apolipoprotein A-I and A-II. In particular, the presence of the allele A of the s-62e34 type is associated with a decrease of approximately 5 mg/dl in the apolipoprotein A-I level.

[0146] The polymorphism s-62e34 according to the invention, which causes the replacement of an arginine (R) with a lysine (K) at position 1587 of the ABCA1 protein, constitutes a functional mutation which affects the HDL cholesterol, apolipoprotein A-I and apolipoprotein A-II levels, and predisposes to a cardiovascular risk.

[0147] Mutations in exon 36

[0148] The mutation s-77e36 consists of the substitution of a guanine (G) with an adenine (A) at position 77 of exon 36, i.e., at position 1064 with respect to the sequence SEQ ID NO: 16. The exon 36 carrying this polymorphism has the nucleotide sequence SEQ ID NO: 73. The cDNA carrying the polymorphism in exon 36 of the ABCA1 gene is represented by the nucleotide sequence SEQ ID NO: 1 16 and encodes a mutated ABCA1 protein of SEQ ID NO: 136 in which a valine (V) is substituted with an isoleucine (I) at position 1674.

[0149] Mutation in intron 36

[0150] The mutation s-55i36 consists of the substitution of a thymine (T) with a cytosine (C) at position 55 of the 5′ end of intron 36, i.e., at position 1220 with respect to the sequence SEQ ID NO: 16. The intron 36 carrying this polymorphism has the partial nucleotide sequence SEQ ID NO: 74.

[0151] Mutation in exon 38

[0152] The mutation s-64e38 consists of the substitution of a thymine (T) to a cytosine (C) at position 64 of exon 38, i.e., at position 835 with respect to the sequence SEQ ID NO: 17. The exon 38 carrying this polymorphism has the nucleotide sequence SEQ ID NO: 75. The cDNA carrying the polymorphism in exon 38 of the ABCA1 gene is represented by the nucleotide sequence SEQ ID NO: 117.

[0153] Mutations in intron 39

[0154] The mutation s-251 i39 consists of the substitution of a thymine (T) with a guanine (G) at position 251 of the 5′ end of intron 39, i.e., at position 375 with respect to the sequence SEQ ID NO: 18. The partial nucleotide sequence of the intron 39 carrying this polymorphism is represented in the sequence SEQ ID NO: 76.

[0155] The mutation s-252i39 consists of the substitution of a thymine (T) with a cytosine (C) at position 252 of the 5′ end of intron 39, i.e., at position 376 with respect to the sequence SEQ ID NO: 18. The partial nucleotide sequence of the intron 39 carrying this polymorphism is represented in the sequence SEQ ID NO: 77.

[0156] Mutation in intron 40

[0157] The mutation s-m119i40 consists of the substitution of a cytosine (C) to a thymine (T) at position −119 upstream of the 3′ end of intron 40, i.e., at position 710 with respect to the sequence SEQ ID NO: 19. The nucleotide sequence of the intron 40 carrying this polymorphism is represented in the sequence SEQ ID NO: 78.

[0158] Mutation in intron 44

[0159] The mutation s-m69i44 consists of the substitution of a thymine (T) with a cytosine (C) at position −69 upstream of the 3′ end of intron 44, i.e., at position 108 with respect to the sequence SEQ ID NO: 20. The partial nucleotide sequence of the intron 44 carrying this polymorphism is represented in the nucleotide sequence SEQ ID NO: 79.

[0160] Mutation in exon 45

[0161] The mutations-114e45 consists of the substitution of a cytosine (C) with a thymine (T) at position 114 of exon 45, i.e., at position 290 with respect to the sequence SEQ ID NO: 20. The exon 45 carrying this polymorphism has the nucleotide sequence SEQ ID NO: 80. The cDNA carrying the polymorphism in exon 45 of the ABCA1 gene is represented by the nucleotide sequence SEQ ID NO: 118.

[0162] Mutation in intron45

[0163] The mutation s-m34i45 consists of the substitution of a cytosine (C) with a thymine (T) at position −34 upstream of the 3′ end of intron 45, i.e., at position 343 with respect to the sequence SEQ ID NO: 21. The partial nucleotide sequence of the intron 45 carrying this polymorphism is represented in the sequence SEQ ID NO: 81.

[0164] Mutations in intron 47

[0165] The mutation s-13i47 consists of the substitution of an adenine (A) with a guanine (G) at position 13 of the 5′ end of intron 47, Le., at position 1068 with respect to the sequence SEQ ID NO: 21. The partial nucleotide sequence of the intron 47 carrying this polymorphism is represented in the sequence SEQ ID NO: 82.

[0166] The mutation s-86i47 consists of the substitution of an adenine (A) with a cytosine (C) at position 86 of the 5′ end of intron 47, i.e., at position 1141 with respect to the sequence SEQ ID NO: 21. The partial nucleotide sequence of the intron 47 carrying this polymorphism is represented in the sequence SEQ ID NO: 83.

[0167] Mutations in exon 49

[0168] The mutation s-377e49 consists of the substitution of a thymine (T) with a cytosine (C) at position 377 of exon 49, i.e., at position 571 with respect to the sequence SEQ ID NO: 22. The exon 49 carrying this polymorphism has the nucleotide sequence SEQ ID NO: 84. The cDNA carrying the polymorphism in exon 49 of the ABCA1 gene is represented by the nucleotide sequence SEQ ID NO: 119.

[0169] The mutation s-833e49 consists of the substitution of a cytosine (C) with a thymine (T) at position 833 of exon 49, i.e., at position 1027 with respect to the sequence SEQ ID NO: 22. The exon 49 carrying this polymorphism has the nucleotide sequence SEQ ID NO: 85. The cDNA carrying the polymorphism in exon 49 of the ABCA1 gene is represented by the nucleotide sequence SEQ ID NO: 120.

[0170] The mutation s-1580e49 consists of the substitution of a cytosine (C) with a thymine (T) at position 1580 of exon 49, i.e., at position 1773 with respect to the sequence SEQ ID NO: 22. The exon 49 carrying this polymorphism has the nucleotide sequence SEQ ID NO: 86. The cDNA carrying the polymorphism in exon 49 of the ABCA1 gene is represented by the nucleotide sequence SEQ ID NO: 121.

[0171] The mutation s-1791e49 consists of the substitution of an adenine (A) with a thymine (T) at position 1791 of exon 49, i.e., at position 1985 with respect to the sequence SEQ ID NO: 22. The exon 49 carrying this polymorphism has the nucleotide sequence SEQ ID NO: 87. The cDNA carrying the polymorphism in exon 49 of the ABCA1 gene is represented by the nucleotide sequence SEQ ID NO: 122.

[0172] The mutation s-2034e49 consists of the substitution of an adenine (A) with a guanine (G) at position 2034 of exon 49, i.e., at position 2228 with respect to the sequence SEQ ID NO: 22. The exon 49 carrying this polymorphism has the nucleotide sequence SEQ ID NO: 88. The cDNA carrying the polymorphism in exon 49 of the ABCA1 gene is represented by the nucleotide sequence SEQ ID NO: 123.

[0173] The mutation s-2049e49 consists of the substitution of a cytosine (C) with a thymine (T) at position 2049 of exon 49, i.e., at position 2243 with respect to the sequence SEQ ID NO: 22. The exon 49 carrying this polymorphism has the nucleotide sequence SEQ ID NO: 89. The cDNA carrying the polymorphism in exon 49 of the ABCA1 gene is represented by the nucleotide sequence SEQ ID NO: 124.

[0174] The mutation s-2449e49 consists of the substitution of an adenine (A) with a guanine (G) at position 2449 of exon 49, i.e., at position 2643 with respect to the sequence SEQ ID NO: 22. The exon 49 carrying this polymorphism has the nucleotide sequence SEQ ID NO: 90. The cDNA carrying the polymorphism in exon 49 of the ABCA1 gene is represented by the nucleotide sequence SEQ ID NO: 125.

[0175] The mutation s-2843e49 consists of the substitution of a guanine (G) with an adenine (A) at position 2843 of exon 49, i.e., at position 3037 with respect to the sequence SEQ ID NO: 22. The exon 49 carrying this polymorphism has the nucleotide sequence SEQ ID NO: 91. The cDNA carrying the polymorphism in exon 49 of the ABCA1 gene is represented by the nucleotide sequence SEQ ID NO: 126.

[0176] Certain polymorphisms found in the coding regions, which correspond essentially to substitution s of a single nucleotide located on the third base of the codons of the open reading frame of ABCA1, do not cause modifications with regard to the nature of the amino acid encoded, given the rules of genetic degeneracy in humans, which are well known to a person skilled in the art. The polymorphisms which do not modify the amino acid sequence can, however, have an important biological function, which can have an effect on the concentration of circulating HDL and, therefore, of apolipoprotein A-I or A-II. Such polymorphisms can, for example, affect the regulation of transcription or translation, for example by acting on mRNA stability, splicing, the rate of transcription and translation, and the accuracy of translation.

[0177] OTHER POLYMORPHISMS

[0178] According to the invention, other polymorphisms have been discovered in the promoter region upstream of the human ABCA1 gene. The polymorphic positions are represented in FIG. 3 by nucleotides marked in bold (and underlined when they are bases framing an insertion) on the sequence of the promoter of the wild-type human ABCA1 gene of sequence SEQ ID NO: 23.

[0179] Table 3 presents the allelic polymorphisms in the promoter sequence of the human ABCA1 gene according to the present invention. The name, wild-type and mutant alleles, polymorphic positions and frequency of appearance of the allelic polymorphisms in two groups of population, the Caucasian population and the Japanese population, are indicated.

TABLE 3
Allelic Polymorphisms In The Promoter Of The Human ABCA1 Gene

| | | | | | | | Frequence In The | |
|---|---|---|---|---|---|---|---|---|
| | | | | | | | Population | |
| Name | Location | Position | 5′-Sequence | Allele 1 | Allele 2 | 3′-Seqence | Caucasian | Japanese |
| s-2389p | Promoter | −2389 | AAAAAAATAC | G | A | AAAATTAGAT | 29.60% | 33.30% |
| sins-2176-2177p | Promoter | −2176 | TGAGGGGAGG | GGAGGGGAGG | - | AGGGAGGGGG | 33.30% | 33.30% |
| s-1814p | Promoter | −1814 | CAGCCTCCTG | A | G | GATAACAGGC | 38.70% | 21.00% |
| s-1801p | Promoter | −1801 | TAACAGGCGC | C | T | CGCCACCACA | 41.90% | 66.10% |
| s-1652p | Promoter | −1652 | CACTGCGCCC | A | G | GCTCAGATCC | 18.70% | 21.00% |
| s-1506p | Promoter | −1506 | CTCTTCTATG | G | C | GTCTGTCCTG | 17.70% | 17.70% |
| s-1395p | Promoter | −1395 | TGAATGTCTG | C | T | ATGCAGGTGG | n.d. | 46.80% |
| s-1252p | Promoter | −1252 | TGCCCTTCAA | G | A | GTGGCTACAA | 27.30% | n.d. |
| s-1217p | Promoter | −1217 | AGGTAGGAGA | C | T | CTTGTGGCCT | 6.80% | 31.30% |
| s-1099p | Promoter | −1099 | AGTTTGACCT | G | T | AGTTTTGGCC | 9.10% | n.d. |
| s-1034-1035p | Promoter | −1034 | ATATTTAGAC | AT | - | ATGGTGTGTA | 25.00% | 19.40% |
| s-940p | Promoter | −940 | GGCAAACAGA | T | G | AAGTTGGAGG | 45.00% | 51.60% |
| s-803p | Promoter | −803 | AAATTAAAAG | G | A | GGGCTGGTCC | 14.60% | 51.90% |
| sΔ-777-774p | Promoter | −777 | GTTCTGTGTT | TTTG | - | TTTGTTTGTT | 11.50% | 5.00% |
| sΔ-773-765p | Promoter | −773 | TGTGTTTTTG | - | TTTGTTTGT | TTTGTTTGTT | 23.10% | 16.70% |
| s-564p | Promoter | −564 | GAGGACTGTC | C | T | GCCTTCCCCT | 21.40% | 32.80% |
| s-407p | Promoter | −407 | GCGGAAAGCA | G | C | GATTTAGAGG | 26.60% | 18.30% |
| s-302p | Promoter | −302 | CGTCTTAGGC | C | T | GGCGGGCCCG | 10.90% | 13.30% |
| s-278p | Promoter | −278 | GGGGGAAGGG | G | C | ACGCAGACCG | 34.40% | 33.30% |
| sΔ-223-219p | Promoter | −223 | CACCCCACCC | - | CACCC | ACCTCCCCCC | 10.90% | 13.30% |
| s-99p | Promoter | −99 | AGGCCGGGAA | G | C | GGGGCGGGGA | 41.70% | 35.00% |
| s-14p | Promoter | −14 | GGAACTAGTC | C | T | CGGCAAAAAC | 20.00% | 4.20% |

[0180] The polymorphism S-2389p consists of the substitution of a guanine (G) with an adenine (A) at position 505 of the first nucleotide of the sequence SEQ ID NO: 23, or at position −2389 with respect to the +1 transcription start site. The nucleic acid comprising the polymorphism S-2389p in the regulatory sequence of the ABCA1 gene is represented by the nucleotide sequence SEQ ID NO: 137.

[0181] The polymorphism Sins-2176-2177p consists of an insertion of the sequence GGAGGGGAGG at position 717 of the first nucleotide of the sequence SEQ ID NO: 23, or at position −2176 with respect to the transcription start site. The nucleic acid comprising the polymorphism Sins-2176-2177p in the regulatory sequence of the ABCA1 gene is represented by the nucleotide sequence SEQ ID NO: 138.

[0182] The polymorphism S-1814p consists of the substitution of an adenine (A) with a guanine (G) at position 1080 of the first nucleotide of the sequence SEQ ID NO: 23, or at position −1814 with respect to the +1 transcription start site. The nucleic acid comprising the polymorphism S-1 814p in the regulatory sequence of the ABCA1 gene is represented by the nucleotide sequence SEQ ID NO: 139.

[0183] The polymorphism S-1801 p consists of the substitution of a cytosine (C) with a thymine (T) at position 1093 of the first nucleotide of the sequence SEQ ID NO: 23, or at position −1801 with respect to the +1 transcription start site. The nucleic acid comprising the polymorphism S-1801 p in the regulatory sequence of the ABCA1 gene is represented by the nucleotide sequence SEQ ID NO: 140.

[0184] The polymorphism S-1652p consists of the substitution of an adenine (A) with a guanine (G) at position 1242 of the first nucleotide of the sequence SEQ ID NO: 23, or at position −1652 with respect to the +1 transcription start site. The nucleic acid comprising the polymorphism S-1652p in the regulatory sequence of the ABCA1 gene is represented by the nucleotide sequence SEQ ID NO: 141.

[0185] The polymorphism S-1506p consists of the substitution of a guanine (G) with a cytosine (C) at position 1388 of the first nucleotide of the sequence SEQ ID NO: 23, or at position −1506 with respect to the +1 transcription start site. The nucleic acid comprising the polymorphism S-1 506p in the regulatory sequence of the ABCA1 gene is represented by the nucleotide sequence SEQ ID NO: 142.

[0186] The polymorphism S-1395p consists of the substitution of a cytosine (C) with a thymine (T) at position 1499 of the first nucleotide of the sequence SEQ ID NO: 23, or at position −1395 with respect to the +1 transcription start site. The nucleic acid comprising the polymorphism S-1395p in the regulatory sequence of the ABCA1 gene is represented by the nucleotide sequence SEQ ID NO: 143.

[0187] The polymorphism S-1252p consists of the substitution of a guanine (G) with an adenine (A) at position 1642 of the first nucleotide of the sequence SEQ ID NO: 23, or at position −1252 with respect to the +1 transcription start site. The nucleic acid comprising the polymorphism S-1252p in the regulatory sequence of the ABCA1 gene is represented by the nucleotide sequence SEQ ID NO: 144.

[0188] The polymorphism S-1217p consists of the substitution of a cytosine (C) with a thymine (T) at position 1677 of the first nucleotide of the sequence SEQ ID NO: 23, or at position −1217 with respect to the +1 transcription start site. The nucleic acid comprising the polymorphism S-1217p in the regulatory sequence of the ABCA1 gene is represented by the nucleotide sequence SEQ ID NO: 145.

[0189] The polymorphism S-1099p consists of the substitution of a guanine (G) with a thymine (T) at position 1795 of the first nucleotide of the sequence SEQ ID NO: 23, or at position −1099 with respect to the +1 transcription start site. The nucleic acid comprising the polymorphism S-1099p in the regulatory sequence of the ABCA1 gene is represented by the nucleotide sequence SEQ ID NO: 146.

[0190] The polymorphism Sins-1034-1035p consists of an insertion of an adenine and of a thymine (AT) at position 1859 of the first nucleotide of the sequence SEQ ID NO: 23, or at position −1034 with respect to the +1 transcription start site. The nucleic acid comprising the polymorphism Sins-1034-1035p in the regulatory sequence of the ABCA1 gene is represented by the nucleotide sequence SEQ ID NO: 147.

[0191] The polymorphism S-940p consists of the substitution of a thymine (T) with a guanine (G) at position 1954 of the first nucleotide of the sequence SEQ ID NO: 23, or at position −940 with respect to the +1 transcription start site. The nucleic acid comprising the polymorphism S-940p in the regulatory sequence of the ABCA1 gene is represented by the nucleotide sequence SEQ ID NO: 148.

[0192] The polymorphism S-803p consists of the substitution of a guanine (G) with an adenine (A) at position 2091 of the first nucleotide of the sequence SEQ ID NO: 23, or at position −803 with respect to the +1 transcription start site. The nucleic acid comprising the polymorphism S-803p in the regulatory sequence of the ABCA1 gene is represented by the nucleotide sequence SEQ ID NO: 149.

[0193] The polymorphism S-777-774p consists of a deletion of a four nucleotide TTTG fragment at position 2117 of the first nucleotide of the sequence SEQ ID NO: 23, or at position -774 with respect to the +1 transcription start site. The nucleic acid comprising the polymorphism S-777-774p in the regulatory sequence of the ABCA1 gene is represented by the nucleotide sequence SEQ ID NO: 150.

[0194] The polymorphism S-773-765p consists of a deletion of a nine nucleotide TTTGTTTGT fragment at position 2121 of the first nucleotide of the sequence SEQ ID NO: 23, or at position -765 with respect to the +1 transcription start site. The nucleic acid comprising the polymorphism S-773-765p in the regulatory sequence of the ABCA1 gene is represented by the nucleotide sequence SEQ ID NO: 151.

[0195] The polymorphism S-564p consists of the substitution of a cytosine (C) with a thymine (T) at position 2330 of the first nucleotide of the sequence SEQ ID NO: 23, or at position -564 with respect to the +1 transcription start site. The nucleic acid comprising the S-564p polymorphism in the regulatory sequence of the ABCA1 gene is represented by the nucleotide sequence SEQ ID NO: 152.

[0196] The polymorphism S-407p consists of the substitution of a guanine (G) with a cytosine (C) at position 2487 of the first nucleotide of the sequence SEQ ID NO: 23, or at position -407 with respect to the +1 transcription start site. The nucleic acid comprising the S-407p polymorphism in the regulatory sequence of the ABCA1 gene is represented by the nucleotide sequence SEQ ID NO: 153.

[0197] The polymorphism S-302p consists of the substitution of a cytosine (C) with a thymine (T) at position 2592 of the first nucleotide of the sequence SEQ ID NO: 23, or at position -302 with respect to the +1 transcription start site. The nucleic acid comprising the S-302p polymorphism in the regulatory sequence of the ABCA1 gene is represented by the nucleotide sequence SEQ ID NO: 154.

[0198] The polymorphism S-278p consists of the substitution of a guanine (G) with a cytosine (C) at position 2616 of the first nucleotide of the sequence SEQ ID NO: 23, or at position -278 with respect to the +1 transcription start site. The nucleic acid comprising the S-278p polymorphism in the regulatory sequence of the ABCA1 gene is represented by the nucleotide sequence SEQ ID NO: 155.

[0199] The polymorphism S-223-219p consists of a deletion of a five nucleotide CACCC fragment at position 2671 of the first nucleotide of the sequence SEQ ID NO: 23, or at position -219 with respect to the +1 transcription start site. The nucleic acid comprising the polymorphism S-223-219p in the regulatory sequence of the ABCA1 gene is represented by the nucleotide sequence SEQ ID NO: 156.

[0200] The polymorphism S-99p consists of the substitution of a guanine (G) with a cytosine (C) at position 2795 of the first nucleotide of the sequence SEQ ID NO: 23, or at position -99 with respect to the +1 transcription start site. The nucleic acid comprising the S-99p polymorphism in the regulatory sequence of the ABCA1 gene is represented by the nucleotide sequence SEQ ID NO: 157.

[0201] The polymorphism S-14p consists of the substitution of a cytosine (C) with a thymine (T) at position 2880 of the first nucleotide of the sequence SEQ ID NO: 23, or at position -14 with respect to the +1 transcription start site. The nucleic acid comprising the S-14p polymorphism in the regulatory sequence of the ABCA1 gene is represented by the nucleotide sequence SEQ ID NO: 158.

[0202] According to a first aspect, the invention also relates to the nucleotide sequences of the ABCA1 gene comprising at least one biallelic polymorphism as described above.

[0203] Thus, a subject of the invention is a nucleic acid comprising a polynucleotide chosen from the group consisting of the nucleotide sequences SEQ ID NOS: 24-126 and 137-158 or a nucleic acid with a complementary sequence.

[0204] The invention also relates to a nucleic acid which hybridizes, under high stringency conditions, with a polynucleotide chosen from the group consisting of the nucleotide sequences SEQ ID NOS: 24-126 and 137-158, or to a nucleic acid with a complementary sequence.

[0205] The invention also relates to a nucleic acid having at least 9 consecutive nucleotides of a polynucleotide chosen from the group consisting of the nucleotide sequences SEQ ID NOS: 24-126 and 137-158, and comprising the polymorphic base, or a nucleic acid with a complementary sequence.

[0206] The invention also relates to a nucleic acid having at least 21 consecutive nucleotides of a polynucleotide chosen from the group consisting of the nucleotide sequences SEQ ID NOS: 24-126 and 137-158, and comprising the polymorphic base, or a nucleic acid with a complementary sequence.

[0207] A subject of the invention is also a nucleic acid having at least 21 consecutive nucleotides of a polynucleotide chosen from the group consisting of the nucleotide sequences SEQ ID NOS: 24-126 and 137-158, the polymorphic base being located at the center of the 21-base nucleotide fragment.

[0208] The invention also relates to a nucleic acid derived from a polynucleotide chosen from the group consisting of the nucleotide sequences SEQ ID NOS: 24-126 and 137-158 comprising the polymorphic sequence and at least two nucleotides located either side of the polymorphic position, or a nucleic acid with a complementary sequence.

[0209] Another subject of the invention relates to a nucleic acid encoding a polypeptide chosen from the group consisting of amino acid sequences SEQ ID NOS: 127-136.

[0210] The invention also relates to a polypeptide comprising an amino acid sequence chosen from the group consisting of the sequences SEQ ID NOS: 127-136.

[0211] A subject of the invention is also an antibody directed against a polymorphic ABCA1 polypeptide comprising an amino acid sequence chosen from the group consisting of the sequences SEQ ID NOS: 127-136, or a peptide fragment of the latter. The antibody according to the invention may comprise a detectable compound.

[0212] A subject of the invention is also a nucleic acid containing a polynucleotide encoding a polypeptide or a nucleic acid of interest functionally linked to a polynucleotide chosen from the group consisting of the nucleotide sequences SEQ ID NOS: 137-158.

[0213] A subject of the present invention is a recombinant cloning and/or expression vector which carries a nucleic acid comprising a polynucleotide chosen from the group consisting of the nucleotide sequences SEQ ID NOS: 24-126 and 137-158, and at least one of the polymorphisms as described above. The invention also relates to a host cell transformed with a nucleic acid comprising a polynucleotide chosen from the group consisting of the nucleotide sequences SEQ ID NOS: 24-126 and 137-158, and at least one of the polymorphisms as described above, or with the recombinant vector described above. The invention also encompasses a nonhuman transgenic mammal in which the somatic cells and/or germ cells have been transformed with a nucleic acid comprising a polynucleotide chosen from the group consisting of the nucleotide sequences SEQ ID NOS: 24-126 and 137-158, and at least one of the polymorphisms as described above, or with a recombinant vector as described above.

[0214] According to another aspect, a subject of the invention is a nucleotide probe or primer capable of hybridizing to nucleic acids of sequences SEQ ID NOS: 24-126 and 137-158 and comprising at least one polymorphic position, or to nucleic acids with a complementary sequence.

[0215] The nucleotide probes and primers comprise a polynucleotide of nucleotide sequence chosen from the group consisting of the sequences SEQ ID NOS: 24-126 and 137-158, or with a complementary sequence, containing one of the polymorphic bases according to the invention.

[0216] Generally, a nucleotide probe according to the invention has a length of 15, 16, 19 to 25, 35, 40, 50, 70, 80, 100, 200, 500, 1000, 1500 consecutive nucleotides of a polynucleotide of nucleotide sequence chosen from the group consisting of the sequences SEQ ID NOS: 24-126 and 137-158, and comprising at least one polymorphic base, or of a nucleic acid with a complementary sequence.

[0217] The nucleotide probes may consist of a nucleic acid comprising at least 21 consecutive nucleotides of a polynucleotide chosen from the group consisting of the nucleotide sequences SEQ ID NOS: 24-126 and 137-158. In one embodiment, the polymorphic base is located at the center of the 21-base nucleotide fragment.

[0218] In general a nucleotide primer according to the invention has a length of 8, 9, 10, 11, 12, 13, 14, 15, 16, 17, 18, 19, 20, 21, 22, 23, 24, 25 to 40 consecutive nucleotides of a polynucleotide of nucleotide sequence chosen from the group consisting of the sequences SEQ ID NOS: 24-126 and 137-158, and comprising at least one polymorphic base, or of a nucleic acid with a complementary sequence.

[0219] The base of the 3′ end of these primers may be complementary to a nucleotide located 2, 3, 4, 5, 6, 7, 8, 9, 10, 11, 12, 13, 14, 15, 16, 17, 18, 19, 20 nucleotides or more on the 3′ side from the position of the polymorphism according to the invention, present in one of the sequences SEQ ID NOS: 24-126 and 137-158 and/or of the complementary sequences thereof.

[0220] The definition of a nucleotide probe and primer according to the invention encompasses, therefore, oligonucleotides which hybridize, under the high stringency hybridization conditions defined above, with a nucleic acid chosen from the sequences SEQ ID NOS: 24-126 and 137-158, comprising at least one of the polymorphisms defined above, or with a sequence complementary to the latter.

[0221] Primers and of pairs of primers which make it possible to amplify various regions of the ABCA1 gene are, for example, the pair of primers represented by the primer of sequence SEQ ID NO: 159 (ACCGAAGTMGGAGTTGCTC) and the primer of sequence SEQ ID NO: 160 (ACTGTTTCACTAATACTTACTG).

[0222] A nucleotide primer or probe according to the invention can be prepared by any suitable method well known to a person skilled in the art, including by cloning and restriction enzyme action or, alternatively, by direct chemical synthesis according to techniques such as the phosphodiester method of Narang et al. (Methods Enzymol (1979) 68, 90-98) or of Brown et al. (Methods Enzymol (1979) 68, 109-151), the diethylphosphoramidite method of Beaucage et al. (Tetrahedron Lett. (1981) 22,1859-1862), or the solid support technique described in EU patent No. EP 0 707 592.

[0223] By way of illustration, suitable nucleotide primers according to the invention are, for example, primers in which the base at the 3 ′ end hybridizes with the base located immediately on the 3′ side of the polymorphic base of the fragment comprising the polymorphism. After a step of specific hybridization of the primer, an elongation step with a mixture of two dideoxynucleotides complementary to the polymorphic base of said polymorphism, for example labeled with two different fluorophores, then a step of detection of the fluorescence signal obtained, makes it possible to determine which of the two differently labeled fluorescent dideoxynucleotides has been incorporated, and to deduce the nature of the polymorphic base.

[0224] Each of the nucleic acids according to the invention, including the oligonucleotide probes and primers described above, can be labeled, if desired, by incorporating a label which can be detected by spectroscopic, photochemical, biochemical, immunochemical or chemical means.

[0225] For example, such labels can consist of radioactive isotopes (³²P, ³³P, ³H, ³⁵S), fluorescent molecules (5-bromodeoxyuridine, fluorescein, acetylamino-fluorene, digoxigenin) or ligands such as biotin.

[0226] The labeling of the probes may be carried out by incorporating labeled molecules into the polynucleotides by primer extension or by addition to the 5′ or 3′ ends.

[0227] Examples of nonradioactive labeling techniques for nucleic acid fragments are described in French patent No. FR 78 109 75 or in the articles by Urdea et al. (Nucl. Ac. Res. (1988) 11, 4937-4957) or Sanchez-pescador et al. (J. Clin. Microbiol. (1988) 26(10) 1934-1938).

[0228] Other approaches may be used for labeling and detecting the dideoxynucleotides. A homogenous phase method based on FRET (Fluorescence Resonance Energy Transfer) has been described, inter alia, by Chen and Kwok (Nucl Ac Res, 25 (1997) 347-353). According to this method, amplified genomic DNA fragments likely to contain polymorphisms are incubated with a primer labeled with fluoroscein at the 5′ end, in the presence of fluorescent dideoxynucleotide triphosphates and of a modified Taq polymerase. The labeled primer is extended by one base by incorporation of the labeled dideoxynucleotide specific for the allele present in the complementary genomic DNA sequence. At the end of this elongation reaction, the fluorescence intensities for the two label compounds of the labeled dideoxynucleotides are analyzed directly without separation or purification. The ratio for these two fluorescences makes it possible to determine the nucleotide used by the polymerase during the elongation, and to deduce the nature of the polymorphic base. This process can be carried out in a single tube, and the fluorescence modifications monitored in real time. Alternatively, the extension primer can be analyzed by MALDI-TOF mass spectrometry. The base located at the polymorphic position is identified by measuring the mass added to the microsequencing primer (Haff et al., Gen Res, 7 (1997) 378-388).

[0229] In one embodiment, probes according to the invention enable an amplification of the signal, like the probes described by Urdea et al. (Nucl. Acid. SympSer. (1991) 24, 197-200) or in European patent No EP-0,225,807.

[0230] The oligonucleotide probes according to the invention also may be used in Southern-type hybridizations to genomic DNA or Northern-type hybridizations to RNA.

[0231] The structural characteristics which make it possible to differentiate the normal sequences from the mutated sequences of ABCA1 (genomic sequences, messenger RNAs, cDNAs) are exploited in order to provide means for detecting the mutated sequences of ABCA1 in a sample, in particular in the form of probes which hybridize specifically with the mutated sequences of ABCA1, or pairs of primers which make it possible to selectively amplify the regions of the ABCA1 gene which carry the polymorphisms described above. Detecting the presence of these mutations can be carried out by discrimination of the length of the nucleic acid fragments amplified, by hybridization of the amplified fragments using the specific probes described above or by direct sequencing of the amplified fragments.

[0232] Nucleotide primers according to the invention can, for example, be immobilized on a support. In addition, it is possible to immobilize on a support, for example, in an ordered manner, multiple specific primers such as described above, each of these primers being suitable for detecting one of the polymorphisms of the ABCA1 gene according to the invention.

[0233] According to another aspect of the present invention, the polymorphisms of the ABCA1 gene are useful as genetic markers in studies of the association between the presence of a given allele in an individual and the predisposition of this individual to a given pathology and/or to a given response to a therapeutic molecule, for example, in the context of pharmacogenetic studies.

[0234] One subject of the present invention is therefore genetic markers comprising all or part of a nucleic acid chosen from the group consisting of the nucleotide sequences SEQ ID NOS: 24-126 and 137-158 or a nucleic acid with a complementary sequence, and comprising one of the polymorphisms according to the invention.

[0235] The genetic markers of the invention may be used for studies of the association of a given allele of the polymorphisms according to the invention with plasma HDL cholesterol, apolipoprotein A-I and apolipoprotein A-II levels in patients.

[0236] In one embodiment of the invention, the genetic markers are used for studies of association of the polymorphisms s-35e1a, s-16e1 b, s-76e1b, s-53e5, s-108e6, s-113e6, s-123e8, s-153e8, s-126e12, s-148e14, s-196e15, s-136e16, s-27e17, s10e7, s-4e18, s-40e19, s-123e22, s-54e23, s-98e24, s-149e24, s-44e27, s-7e30, s-166e30, s-62e34, s-77e36, s-64e38, s-114e45, s-377e49, s-833e49, s-1580e49, s-1791 e49, s-2034e49, s-2049e49, s-2449e49, and s-2843e49 plasma HDL cholesterol, apolipoprotein A-I and apolipoprotein A-l1 levels in patients.

[0237] In another embodiment of the invention, the genetic markers are used for studies of association of the polymorphisms s-113e6, s-1 96e15, s-136e16, s27e17, s-107e17, s-4e18, s-123e22, s-54e23, s-62e34, and s-77e36 with plasma HDL cholesterol, apolipoprotein A-I and apolipoprotein A-II levels in patients.

[0238] In one aspect, the present invention relates to genetic markers comprising all or part of a nucleic acid chosen from the group consisting of the nucleotide sequences SEQ ID NOS: 24-126 and 137-158 or a nucleic acid with a complementary sequence, for studies of the association of the polymorphisms as described above with a cardiovascular risk in patients, and more particularly a risk of myocardial infarction.

[0239] There are various types of method for the genetic analysis of complex character (phenotypes) (Lander et al. Science, 265 (1994) 2037-2048). In general, the biallelic polymorphisms according to the invention are useful in any one of the methods described in the prior art intended to demonstrate a statistically significant correlation between a genotype and a phenotype. For example, the biallelic polymorphisms can be used in linkage analyses and in allele sharing methods. Additionally, the biallelic polymorphisms according to the invention may be used for identifying genes associated with characteristics (phenotypes) which can be detected using association studies, this being an approach which does not require using families affected by the characteristic, and which also enables the identification of genes associated with complex and sporadic characteristics.

[0240] Other statistical methods using the biallelic polymorphisms according to the invention are, for example, those described by Forsell et al. (Biol Psychiatry 42 (1997) 898-903) Xiong et al. (Ann J Hum Genet 64 (1999) 629-640), Horvath et al. (Am J Hum Genet 63 (1998) 1886-1897), Sham et al. (Ann Hum Genet 59 (1995) 323-336) or Nickerson et al. (Genomics, 12 (1992) 377-387). In one aspect, the biallelic polymorphisms are used to identify the genes associated with a phenotype.

[0241] According to another aspect, a subject of the present invention is a method for detecting one of the polymorphisms described above in the nucleotide sequence of the ABCA1 gene of an individual.

[0242] The method according to the invention consists in determining the nucleotide sequence of all or part of the ABCA1 gene in said individual at one of the polymorphic positions of the invention and identifying the presence or absence of the SNP (single nucleotide polymorphism) at the position analyzed.

[0243] In one embodiment, the detection method according to the invention consists of determining the presence of a G or of an A at polymorphic position 113 of exon 6, the presence of a G or of an A at polymorphic position 196 of exon 15, the presence of a G or of an A at polymorphic position 136 of exon 16, the presence of an A or of a G at polymorphic position 107 of exon 17, the presence of a T or of a C at polymorphic position 27 of exon 17, the presence of a G or of a T at polymorphic position 4 of exon 18, the presence of a C or of a T at polymorphic position 123 of exon 22, the presence of a G or of a C at polymorphic position 54 of exon 23, the presence of a C or of a T at polymorphic position 62 of exon 34, the presence of a G or of an A at polymorphic position 77 of exon 36.

[0244] The detection method according to the present invention may also consists of determining the nucleotide sequence of the ABCA1 gene at position 62 of exon 34 and the SNP corresponding to the presence of a C or of a T.

[0245] According to a first embodiment of the method of the invention, the presence of at least one of the SNPs described above is identified by sequencing all or part of the ABCA1 gene of the individual at the polymorphic positions.

[0246] Amplification and sequencing primers can be constructed so as to hybridize with a given region of a sequence chosen from the group of sequence consisting of the sequences SEQ ID NOS: 24-126 and SEQ ID NOS: 137-158, or with a complementary sequence, and comprising at least one polymorphic position. Such sequencing primers are generally constructed to amplify fragments of approximately 250 to approximately 500 nucleotides, comprising at least one of the polymorphic positions according to the invention.

[0247] The fragments amplified, for example, by the PCR method, are then sequenced, and the sequence obtained is compared with the reference sequences SEQ ID NOS: 24-91 and 137 to 158 in order to determine whether or not one or more nucleotide deletions, additions or substitutions are found in the sequence amplified from the DNA contained in the biological sample originating from the individual tested.

[0248] The method of the invention allows the amplification of a nucleic acid containing at least one of the polymorphisms of the invention, and comprising the following steps:

[0249] a) bringing a sample, in which the presence of the ABCA1 nucleic acid is suspected, into contact with a pair of nucleotide primers for which the hybridization position is located, respectively, on the 5′ side on one strand, and on the 3′ side on the complementary strand, of the region of the target nucleic acid the amplification of which is desired, in the presence of the reagents required for the amplification reaction;

[0250] b) amplifying the region of the target nucleic acid; and

[0251] c) detecting the nucleic acid(s) amplified.

[0252] In order to implement the amplification method as defined above, use will advantageously be made of any one of the nucleotide primers defined according to the criteria mentioned above.

[0253] According to this embodiment, the invention relates, therefore, to a method for detecting one of the polymorphisms according to the invention in the ABCA1 gene of an individual, comprising the following steps:

[0254] a) sequencing, from a biological material originating from the individual to be tested, a nucleic acid fragment using at least one nucleotide primer which hybridizes with the sequence chosen from the sequences SEQ ID NOS: 24-91 or the sequences SEQ ID NOS: 137-158 according to the invention;

[0255] b) aligning the sequence obtained in a) with the sequence corresponding to the amplified sequence chosen from the sequences SEQ ID NOS: 24-91 or the sequences SEQ ID NOS: 137-158;

[0256] c) determining the presence of a polymorphism in the sequence of the nucleic acid fragment with respect to the reference sequences SEQ ID NOS: 24-91 or the reference sequences SEQ ID NOS: 137-158.

[0257] The method for detecting the presence of a polymorphism of the ABCA1 gene in an individual also comprises the steps of:

[0258] a) sequencing, from a biological material originating from the individual to be tested, all or part of the ABCA1 gene using a nucleotide primer which hybridizes with the sequence chosen from the [lacuna] SEQ ID NOS: 24-91 or the sequences SEQ ID NOS: 137-158;

[0259] b) aligning the nucleotide sequence obtained in a) with a sequence chosen from the group consisting of the sequences SEQ ID NOS: 1 and 3-23;

[0260] c) determining the nucleotide differences between the sequenced polynucleotide originating from the biological material of the individual to be tested and the reference sequences SEQ ID NOS: 1 and 3-23.

[0261] Another embodiment of the method according to the present invention uses the oligonucleotide probes as described above, which are capable of hybridizing specifically with a corresponding region of one of the sequences SEQ ID NOS: 24-91 or with a corresponding region of one of the sequences SEQ ID NOS: 137-158, and comprising at least one of the polymorphic bases according to the invention as described above, for the purpose of detecting the presence of one or more of the polymorphisms according to the invention in a sample originating from an individual.

[0262] In one embodiment, the nucleotide probes consist of a nucleic acid comprising at least 21 consecutive nucleotides of a polynucleotide chosen from the group consisting of the nucleotide sequences SEQ ID NOS: 24-126 and 137-158, the polymorphic base being located in the center of the 21-base nucleotide fragment.

[0263] The nucleotide probes according to this embodiment of the invention may be immobilized on a solid support. Such solid supports are well known to a person skilled in the art and comprise surfaces of microtitration plate wells covered with polystyrene beds, with magnetic beds, with nitrocellulose strips or with microparticles such as latex particles.

[0264] Consequently, the present invention also relates to a method for detecting the presence of a nucleic acid as described above in a sample, said method comprising the steps of:

[0265] a) bringing one or more nucleotide probes according to the invention into contact with the sample to be tested;

[0266] b) allowing one or more nucleotide probes to hybridize with complementary sequences present in the sample; and

[0267] c) detecting the hybrid(s) possibly formed between the probe(s) and the nucleic acid present in the sample.

[0268] The oligonucleotide probe(s) may be immobilized on a support and, may comprise a detectable label.

[0269] According to another aspect of the present invention, the methods for detecting the polymorphisms described above are used for diagnosing, in an individual, after an association study, a predisposition to develop a certain pathology, or for predicting, after a pharmacogenetic study, the pharmacological response of a patient to a given molecule.

[0270] Such the methods make it possible to diagnose a pathological risk linked to a deficiency of the ABCA1 transporter, or a nil or undesirable response to a given therapeutic molecule, in an individual who has been identified as carrying a given allele of at least one of the polymorphisms according to the invention.

[0271] The methods according to the invention are, for example, useful for diagnosing the predisposition of an individual to exhibit a coronary or cardiovascular risk, such as a risk of myocardial infarction or of atherosclerosis.

[0272] The methods according to the invention make it possible to determine whether or not an individual is at risk for developing a pathology linked to a deficiency in cholesterol metabolism, in particular, in the reverse transport of cholesterol, a risk of developing a familial HDL deficiency such as Tangier disease, or, more generally, a cardiovascular disease or a coronary disorder, such as a risk of myocardial infarction or of atherosclerosis.

[0273] Such methods comprise detecting, in cells from a biological sample originating from the individual to be tested, the presence or absence of a given allele of one of the polymorphisms according to the invention as described in Table 2, in the sequence of the human ABCA1 gene of sequence SEQ ID NOS: 3-22.

[0274] The methods according to the invention also make it possible to detect, in cells from a biological sample originating from the individual to be tested, the presence or absence of a given allele of one of the polymorphisms according to the invention as described in Table 3, in the regulatory sequence SEQ ID NO: 23 upstream of the ABCA1 gene, characterized by a modification in the expression of a gene whose expression is regulated by the ABCA1 promoter.

[0275] A subject of the present invention is a method for diagnosing a pathology linked to a deficiency of the ABCA1 transporter, which consists in detecting, in an individual, the presence of a given allele of one of the polymorphisms of the invention according to one of the detection methods described above.

[0276] The methods of the invention make it possible to diagnose the predisposition of an individual to develop a cardiovascular disease such as a myocardial infarction.

[0277] An additional subject of the present invention is a method and a kit for diagnosing a risk of myocardial infarction or a risk of cardiovascular disorder in an individual, consisting in detecting, in said individual, the presence of a nucleic acid comprising a polynucleotide of sequence SEQ ID NO: 72 or 115, and comprising a polymorphic base A at position 62 of exon 34, i.e., at position 5382 with respect to the sequence SEQ ID NO: 15.

[0278] A subject of the present invention is a method for predicting a pharmacological response linked to a variation of the ABCA1 transporter or of its regulation, which consists in detecting, in an individual, the presence of a given allele of at least one of the polymorphisms of the invention according to one of the detection methods described above.

[0279] By way of illustration, such SNP polymorphisms can be detected in order to determine the existence of a substitution of a nucleotide in the sequence of a nucleic acid corresponding to the ABCA1 gene of sequence SEQ ID NOS: 3-22 and/or in the regulatory sequence upstream of the ABCA1 gene of sequence SEQ ID NO: 23, or of the addition of one or more nucleotides or of the deletion of one or more nucleotides, in said sequences SEQ ID NOS: 3-22 or SEQ ID NO: 23.

[0280] A subject of the present invention is also the use of the oligonucleotide probes which hybridize specifically with a corresponding region of one of the sequences SEQ ID NOS: 24-126 or with a corresponding region of one of the sequences SEQ ID NOS: 137-158, comprising at least one of the polymorphic bases according to the invention as described above, for the purpose of diagnosing, in an individual, a predisposition to the development of a pathology linked to a deficiency in the reverse transport of cholesterol, such as myocardial infarction, atherosclerosis or Tangier disease, or more generally a cardiovascular disorder, or of predicting the pharmacological response of an individual to a given therapeutic molecule.

[0281] The diagnostic methods according to the present invention can advantageously be used in order to evaluate the efficacy of therapeutic products in the treatment of disorders linked to a deficiency of the ABCA1 transporter.

[0282] Individuals who are carriers of an allelic polymorphism of the ABCA1 gene can have, for example, differences in concentration of the various lipid variables which are commonly measured, such as the levels of HDL cholesterol, of triglycerides, of apolipoproteins A-I and A-II or of A-I and A-II lipoprotein particles, or differences in the regulation of the biosynthesis of the protein. The differences observed due to the presence of an allelic variant in an individual can be modified when a particular therapeutic agent is administered to said individual. The methods according to the present invention can, therefore, be useful for determining the clinical effect of a therapeutic substance and determining the therapeutic doses to be administered.

[0283] According to a final aspect, a subject of the present invention is a kit or pack for detecting the presence of one of the polymorphisms as described above, in the ABCA1 gene in an individual, said pack comprising:

[0284] a) one or more primers which hybridize with a region chosen from the sequences SEQ ID NOS: 24-126 or the sequences SEQ ID NOS: 137-158;

[0285] b) where appropriate, the means required for carrying out an amplification reaction for at least one polymorphic position of the present invention.

[0286] A subject of the invention is also a kit or pack for detecting one of the polymorphisms of the present invention in the ABCA1 gene, in an individual, comprising:

[0287] a) one or more oligonucleotide probes as defined above;

[0288] b) where appropriate, the reagents required for carrying out a hybridization reaction.

[0289] The nucleic acid fragments derived from any one of the nucleotide sequences SEQ ID NOS: 24-126 comprising one of the polymorphisms of the invention are, therefore, useful for detecting the presence of at least one polymorphic allele of the ABCA1 gene in a sample.

[0290] The probes according to the invention can also be used for detecting PCR amplification products or for detecting mismatches.

[0291] The detection pack or kit may comprise one or more probes that are immobilized on a support.

[0292] According to a second embodiment, the detection pack or kit is characterized in that the oligonucleotide probes comprise a detectable label.

[0293] According to one particular embodiment of the detection kit described above, such a kit will comprise a plurality of oligonucleotide probes in accordance with the invention, which may be used for detecting target sequences of interest or, alternatively, detecting mutations in the coding regions or in the noncoding regions of the nucleic acids according to the invention, more particularly of the nucleic acids of sequences SEQ ID NOS: 1 and 3-23 or the nucleic acids with a complementary sequence.

[0294] The probes according to the invention which are immobilized on a support can be organized in matrices such as “DNA chips”. Such ordered matrices have in particular been described in U.S. Pat. No. 5 143 854, and in applications WO 90/15 070 and WO 92/10 092.

[0295] Support matrices on which oligonucleotide probes have been immobilized at a high density are, for example, described in U.S. Pat. No. 5,412,087 and in PCT application No. WO 95/11 995.

[0296] The nucleotide primers according to the invention can be used for amplifying any one of the nucleic acids according to the invention, and more particularly all or part of a nucleic acid of sequences SEQ ID NOS: 24-126 and 137-158.

[0297] A subject of the invention is also a pack or kit for amplifying a nucleic acid according to the invention, and more particularly all or a part of a nucleic acid of sequences SEQ ID NOS: 1 and 3-23, said pack or kit comprising:

[0298] a) a pair of nucleotide primers in accordance with the invention, for which the hybridization position is located, respectively, on the 5′ side and on the 3′ side of the target nucleic acid the amplification of which is desired;

[0299] b) where appropriate, the reagents required for the amplification reaction.

[0300] Such an amplification pack or kit will advantageously comprise at least one pair of nucleotide primers as described above.

[0301] The invention is, in addition, illustrated, without however being limited, by the figures and examples below.

[0302] FIG. 1 illustrates the sequence SEQ ID NO: 1 corresponding to the nucleotide sequence of the transcript of the human ABCA1 gene;

[0303] FIG. 2 illustrates the amino acid sequence SEQ ID NO: 2 corresponding to the peptide sequence of the ABCA1 transporter protein;

[0304] FIG. 3 illustrates the regulatory sequence SEQ ID NO: 23 upstream of the human ABCA1 gene; the position of the various polymorphisms is indicated in bold.

### EXAMPLE 1: IDENTIFICATION OF THE POLYMORPHISMS OF ABCA1

[0305] The detection of polymorphisms in the sequences of the transcripts, or in the genomic sequences, of the ABCA1 gene can be carried out according to various protocols. One method is direct sequencing.

[0306] In the case of a transcript for which the structure of the corresponding gene is unknown or partially known, it is necessary to determine precisely its intron-exon structure and the genomic sequence of the corresponding gene. It involves, therefore, first isolating the ABCA1 clone(s) of genomic DNA corresponding to the transcript studied, sequencing the insert of the corresponding clone(s) and determining the intron-exon structure by comparing the sequence of the cDNA with that of the genomic DNA obtained. The technique for determining polymorphisms by direct sequencing consists in comparing the genomic sequences of the ABCA1 gene which have been obtained from at least 32 individuals from each population tested, Caucasian, African and Japanese. The divergences in sequence constitute polymorphisms. All those which modify the amino acid sequence of the wild-type protein are mutations likely to affect the function of said protein, which it is interesting to consider more particularly in the case/control association studies described in example 2.

[0307] Primers for amplifying the DNA of individuals were designed based on the nonrepetitive sequences of the intronic DNA of the ABCA1 gene, so as to include an amplification of the intron/exon junctions and of the bases essential for the formation of the secondary structure during the RNA splicing step, in the amplified fragments.

[0308] The genomic DNA of the individuals was amplified with the aid of the primers described above, using Qiagen's Star Taq® kit (Qiagen, Valencia, Calif.) or the Supertaq®) kit (Ambion, Austin, Tex.), using the hybridization conditions and amplification cycle conditions recommended by the manufacturer.

[0309] The amplified PCR products were purified using a kit sold by the company Qiagen, then sequenced by the Big Dye Terminator method on an ABI 3700 sequencer (Apllied Biosystems, Foster City, Calif.).

[0310] EXAMPLE 2: ANALYSIS OF THE POLYMORPHISMS OF THE ABCA1 GENE

[0311] The Case-Control Study of Myocardial Infarction (CCSMI) is a study of patients who have suffered a myocardial infarction and of control individuals originating from Northern Ireland, from England and from France (all of the Caucasian type).

[0312] The study was carried out in order to identify a possible association of exon polymorphisms such as for example s-16e1b, s-113e6, s-135e8, s-148e14, s-136e16, s-101e17, s-54e23, s-7e30, s-62e34, s-833e49 and s-2034e49, with plasma HDL cholesterol, ApoA-I and ApoA-II levels in controls and patients.

[0313] The genomic DNA of the individuals was amplified with the aid of the primers described above which make it possible to amplify specifically the exon of interest and the corresponding intron-exon junctions, using, for example, Qiagen's Star Taq® kit (Qiagen, Valencia, Calif.) or the Supertaq®) kit (Ambion, Austin, Tex.), under the hybridization conditions and amplification cycle conditions recommended by the manufacturer. Minisequencing reactions were carried out on these amplicons for each of the polymorphisms selected. The genotype of each of the controls and of the patients was thus determined for each of the polymorphisms.

[0314] These data were analyzed using the SAS software. The Hardy-Weinberg equilibrium was tested using a ² test with 1 df. The genotypic and allelic frequencies were compared between the groups using ² tests. The various phenotypic parameters were compared between the genotypes by ANOVA variance analysis.

The application's sequence listing, which the Patent Office published only in electronic form, follows.

SEQUENCE LISTING (161 sequences)

SEQ ID NO: 1 - DNA, 9741 bp, Homo sapiens
  modified_base (7009): a, t, c or g
cttgttttttccccggttctgttttctccccttctccggaaggcttgtcaaggggtaggagaaagagacgcaaacacaaaagtggaaaacagttaatgaccagccacggcgtccctgctgtgagctctggccgctgccttccagggctcccgagccacacgctgggggtgctggctgagggaacatggcttgttggcctcagctgaggttgctgctgtggaagaacctcactttcagaagaagacaaacatgtcagctgctgctggaagtggcctggcctctatttatcttcctgatcctgatctctgttcggctgagctacccaccctatgaacaacatgaatgccattttccaaataaagccatgccctctgcaggaacacttccttgggttcaggggattatctgtaatgccaacaacccctgtttccgttacccgactcctggggaggctcccggagttgttggaaactttaacaaatccattgtggctcgcctgttctcagatgctcggaggcttcttttatacagccagaaagacaccagcatgaaggacatgcgcaaagttctgagaacattacagcagatcaagaaatccagctcaaacttgaagcttcaagatttcctggtggacaatgaaaccttctctgggttcctgtatcacaacctctctctcccaaagtctactgtggacaagatgctgagggctgatgtcattctccacaaggtatttttgcaaggctaccagttacatttgacaagtctgtgcaatggatcaaaatcagaagagatgattcaacttggtgaccaagaagtttctgagctttgtggcctaccaagggagaaactggctgcagcagagcgagtacttcgttccaacatggacatcctgaagccaatcctgagaacactaaactctacatctcccttcccgagcaaggagctggccgaagccacaaaaacattgctgcatagtcttgggactctggcccaggagctgttcagcatgagaagctggagtgacatgcgacaggaggtgatgtttctgaccaatgtgaacagctccagctcctccacccaaatctaccaggctgtgtctcgtattgtctgcgggcatcccgagggaggggggctgaagatcaagtctctcaactggtatgaggacaacaactacaaagccctctttggaggcaatggcactgaggaagatgctgaaaccttctatgacaactctacaactccttactgcaatgatttgatgaagaatttggagtctagtcctctttcccgcattatctggaaagctctgaagccgctgctcgttgggaagatcctgtatacacctgacactccagccacaaggcaggtcatggctgaggtgaacaagaccttccaggaactggctgtgttccatgatctggaaggcatgtgggaggaactcagccccaagatctggaccttcatggagaacagccaagaaatggaccttgtccggatgctgttggacagcagggacaatgaccacttttgggaacagcagttggatggcttagattggacagcccaagacatcgtggcgtttttggccaagcacccagaggatgtccagtccagtaatggttctgtgtacacctggagagaagctttcaacgagactaaccaggcaatccggaccatatctcgcttcatggagtgtgtcaacctgaacaagctagaacccatagcaacagaagtctggctcatcaacaagtccatggagctgctggatgagaggaagttctgggctggtattgtgttcactggaattactccaggcagcattgagctgccccatcatgtcaagtacaagatccgaatggacattgacaatgtggagaggacaaataaaatcaaggatgggtactgggaccctggtcctcgagctgacccctttgaggacatgcggtacgtctgggggggcttcgcctacttgcaggatgtggtggagcaggcaatcatcagggtgctgacgggcaccgagaagaaaactggtgtctatatgcaacagatgccctatccctgttacgttgatgacatctttctgcgggtgatgagccggtcaatgcccctcttcatgacgctggcctggatttactcagtggctgtgatcatcaagggcatcgtgtatgagaaggaggcacggctgaaagagaccatgcggatcatgggcctggacaacagcatcctctggtttagctggttcattagtagcctcattcctcttcttgtgagcgctggcctgctagtggtcatcctgaagttaggaaacctgctgccctacagtgatcccagcgtggtgtttgtcttcctgtccgtgtttgctgtggtgacaatcctgcagtgcttcctgattagcacactcttctccagagccaacctggcagcagcctgtgggggcatcatctacttcacgctgtacctgccctacgtcctgtgtgtggcatggcaggactacgtgggcttcacactcaagatcttcgctagcctgctgtctcctgtggcttttgggtttggctgtgagtactttgccctttttgaggagcagggcattggagtgcagtgggacaacctgtttgagagtcctgtggaggaagatggcttcaatctcaccacttcggtctccatgatgctgtttgacaccttcctctatggggtgatgacctggtacattgaggctgtctttccaggccagtacggaattcccaggccctggtattttccttgcaccaagtcctactggtttggcgaggaaagtgatgagaagagccaccctggttccaaccagaagagaatatcagaaatctgcatggaggaggaacccacccacttgaagctgggcgtgtccattcagaacctggtaaaagtctaccgagatgggatgaaggtggctgtcgatggcctggcactgaatttttatgagggccagatcacctccttcctgggccacaatggagcggggaagacgaccaccatgtcaatcctgaccgggttgttccccccgacctcgggcaccgcctacatcctgggaaaagacattcgctctgagatgagcaccatccggcagaacctgggggtctgtccccagcataacgtgctgtttgacatgctgactgtcgaagaacacatctggttctatgcccgcttgaaagggctctctgagaagcacgtgaaggcggagatggagcagatggccctggatgttggtttgccatcaagcaagctgaaaagcaaaacaagccagctgtcaggtggaatgcagagaaagctatctgtggccttggcctttgtcgggggatctaaggttgtcattctggatgaacccacagctggtgtggacccttactcccgcaggggaatatgggagctgctgctgaaataccgacaaggccgcaccattattctctctacacaccacatggatgaagcggacgtcctgggggacaggattgccatcatctcccatgggaagctgtgctgtgtgggctcctccctgtttctgaagaaccagctgggaacaggctactacctgaccttggtcaagaaagatgtggaatcctccctcagttcctgcagaaacagtagtagcactgtgtcatacctgaaaaaggaggacagtgtttctcagagcagttctgatgctggcctgggcagcgaccatgagagtgacacgctgaccatcgatgtctctgctatctccaacctcatcaggaagcatgtgtctgaagcccggctggtggaagacatagggcatgagctgacctatgtgctgccatatgaagctgctaaggagggagcctttgtggaactctttcatgagattgatgaccggctctcagacctgggcatttctagttatggcatctcagagacgaccctggaagaaatattcctcaaggtggccgaagagagtggggtggatgctgagacctcagatggtaccttgccagcaagacgaaacaggcgggccttcggggacaagcagagctgtcttcgcccgttcactgaagatgatgctgctgatccaaatgattctgacatagacccagaatccagagagacagacttgctcagtgggatggatggcaaagggtcctaccaggtgaaaggctggaaacttacacagcaacagtttgtggcccttttgtggaagagactgctaattgccagacggagtcggaaaggattttttgctcagattgtcttgccagctgtgtttgtctgcattgcccttgtgttcagcctgatcgtgccaccctttggcaagtaccccagcctggaacttcagccctggatgtacaacgaacagtacacatttgtcagcaatgatgctcctgaggacacgggaaccctggaactcttaaacgccctcaccaaagaccctggcttcgggacccgctgtatggaaggaaacccaatcccagacacgccctgccaggcaggggaggaagagtggaccactgccccagttccccagaccatcatggacctcttccagaatgggaactggacaatgcagaacccttcacctgcatgccagtgtagcagcgacaaaatcaagaagatgctgcctgtgtgtcccccaggggcaggggggctgcctcctccacaaagaaaacaaaacactgcagatatccttcaggacctgacaggaagaaacatttcggattatctggtgaagacgtatgtgcagatcatagccaaaagcttaaagaacaagatctgggtgaatgagtttaggtatggcggcttttccctgggtgtcagtaatactcaagcacttcctccgagtcaagaagttaatgatgccaccaaacaaatgaagaaacacctaaagctggccaaggacagttctgcagatcgatttctcaacagcttgggaagatttatgacaggactggacaccaaaaataatgtcaaggtgtggttcaataacaagggctggcatgcaatcagctctttcctgaatgtcatcaacaatgccattctccgggccaacctgcaaaagggagagaaccctagccattatggaattactgctttcaatcatcccctgaatctcaccaagcagcagctctcagaggtggctccgatgaccacatcagtggatgtccttgtgtccatctgtgtcatctttgcaatgtccttcgtcccagccagctttgtcgtattcctgatccaggagcgggtcagcaaagcaaaacacctgcagttcatcagtggagtgaagcctgtcatctactggctctctaattttgtctgggatatgtgcaattacgttgtccctgccacactggtcattatcatcttcatctgcttccagcagaagtcctatgtgtcctccaccaatctgcctgtgctagcccttctacttttgctgtatgggtggtcaatcacacctctcatgtacccagcctcctttgtgttcaagatccccagcacagcctatgtggtgctcaccagcgtgaacctcttcattggcattaatggcagcgtggccacctttgtgctggagctgttcaccgacaataagctgaataatatcaatgatatcctgaagtccgtgttcttgatcttcccacatttttgcctgggacgagggctcatcgacatggtgaaaaaccaggcaatggctgatgccctggaaaggtttggggagaatcgctttgtgtcaccattatcttgggacttggtgggacgaaacctcttcgccatggccgtggaaggggtggtgttcttcctcattactgttctgatccagtacagattcttcatcaggcccagacctgtaaatgcaaagctatctcctctgaatgatgaagatgaagatgtgaggcgggaaagacagagaattcttgatggtggaggccagaatgacatcttagaaatcaaggagttgacgaagatatatagaaggaagcggaagcctgctgttgacaggatttgcgtgggcattcctcctggtgagtgctttgggctcctgggagttaatggggctggaaaatcatcaactttcaagatgttaacaggagataccactgttaccagaggagatgctttccttaacagaaatagtatcttatcaaacatccatgaagtacatcagaacatgggctactgccctcagtttgatgccatcacagagctgttgactgggagagaacacgtggagttctttgcccttttgagaggagtcccagagaaagaagttggcaaggttggtgagtgggcgattcggaaactgggcctcgtgaagtatggagaaaaatatgctggtaactatagtggaggcaacaaacgcaagctctctacagccatggctttgatcggcgggcctcctgtggtgtttctggatgaacccaccacaggcatggatcccaaagcccggcggttcttgtggaattgtgccctaagtgttgtcaaggaggggagatcagtagtgcttacatctcatagtatggaagaatgtgaagctctttgcactaggatggcaatcatggtcaatggaaggttcaggtgccttggcagtgtccagcatctaaaaaataggtttggagatggttatacaatagttgtacgaatagcagggtccaacccggacctgaagcctgtccaggatttctttggacttgcatttcctggaagtgttccaaaagagaaacaccggaacatgctacaataccagcttccatcttcattatcttctctggccaggatattcagcatcctctcccagagcaaaaagcgactccacatagaagactactctgtttctcagacaacacttgaccaagtatttgtgaactttgccaaggaccaaagtgatgatgaccacttaaaagacctctcattacacaaaaaccagacagtagtggacgttgcagttctcacatcttttctacaggatgagaaagtgaaagaaagctatgtatgaagaatcctgttcatacggggtggctgaaagtaaagaggnactagactttcctttgcaccatgtgaagtgttgtggagaaaagagccagaagttgatgtgggaagaagtaaactggatactgtactgatactattcaatgcaatgcaattcaatgcaatgaaaacaaaattccattacaggggcagtgcctttgtagcctatgtcttgtatggctctcaagtgaaagacttgaatttagttttttacctatacctatgtgaaactctattatggaacccaatggacatatgggtttgaactcacactttttttttttttttgttcctgtgtattctcattggggttgcaacaataattcatcaagtaatcatggccagcgattattgatcaaaatcaaaaggtaatgcacatcctcattcactaagccatgccatgcccaggagactggtttcccggtgacacatccattgctggcaatgagtgtgccagagttattagtgccaagtttttcagaaagtttgaagcaccatggtgtgtcatgctcacttttgtgaaagctgctctgctcagagtctatcaacattgaatatcagttgacagaatggtgccatgcgtggctaacatcctgctttgattccctctgataagctgttctggtggcagtaacatgcaacaaaaatgtgggtgtctctaggcacgggaaacttggttccattgttatattgtcctatgcttcgagccatgggtctacagggtcatccttatgagactcttaaatatacttagatcctggtaagaggcaaagaatcaacagccaaactgctggggctgcaagctgctgaagccagggcatgggattaaagagattgtgcgttcaaacctagggaagcctgtgcccatttgtcctgactgtctgctaacatggtacactgcatctcaagatgtttatctgacacaagtgtattatttctggctttttgaattaatctagaaaatgaaaagatggagttgtattttgacaaaaatgtttgtactttttaatgttatttggaattttaagttctatcagtgacttctgaatccttagaatggcctctttgtagaaccctgtggtatagaggagtatggccactgccccactatttttattttcttatgtaagtttgcatatcagtcatgactagtgcctagaaagcaatgtgatggtcaggatctcatgacattatatttgagtttctttcagatcatttaggatactcttaatctcacttcatcaatcaaatattttttgagtgtatgctgtagctgaaagagtatgtacgtacgtataagactagagagatattaagtctcagtacacttcctgtgccatgttattcagctcactggtttacaaatataggttgtcttgtggttgtaggagcccactgtaacaatactgggcagcctttttttttttttttaattgcaacaatgcaaaagccaagaaagtataagggtcacaagtctaaacaatgaattcttcaacagggaaaacagctagcttgaaaacttgctgaaaaacacaacttgtgtttatggcatttagtaccttcaaataattggctttgcagatattggataccccattaaatctgacagtctcaaatttttcatctcttcaatcactagtcaagaaaaatataaaaacaacaaatacttccatatggagcatttttcagagttttctaacccagtcttatttttctagtcagtaaacatttgtaaaaatactgtttcactaatacttactgttaactgtcttgagagaaaagaaaaatatgagagaactattgtttggggaagttcaagtgatctttcaatatcattactaacttcttccactttttccaaaatttgaatattaacgctaaaggtgtaagacttcagatttcaaattaatctttctatattttttaaatttacagaatattatataacccactgctgaaaaagaaaaaaatgattgttttagaagttaaagtcaatattgattttaaatataagtaatgaaggcatatttccaataactagtgatatggcatcgttgcattttacagtatcttcaaaaatacagaatttatagaataatttctcctcatttaatatttttcaaaatcaaagttatggtttcctcattttactaaaatcgtattctaattcttcattatagtaaatctatgagcaactccttacttcggttcctctgatttcaaggccatattttaaaaaatcaaaaggcactgtgaactattttgaagaaaacacaacattttaatacagattgaaaggacctcttctgaagctagaaacaatctatagttatacatcttcattaatactgtgttaccttttaaaatagtaattttttacattttcctgtgtaaacctaattgtggtagaaatttttaccaactctatactcaatcaagcaaaatttctgtatattccctgtggaatgtacctatgtgagtttcagaaattctcaaaatacgtgttcaaaaatttctgcttttgcatctttgggacacctcagaaaacttattaacaactgtgaatatgagaaatacagaagaaaataataagccctctatacataaatgcccagcacaattcattgttaaaaaacaaccaaacctcacactactgtatttcattatctgtactgaaagcaaatgctttgtgactattaaatgttgcacatcattcattcaaaaaaaaaaaaaaaaaaa

SEQ ID NO: 2 - protein, 2261 aa, Homo sapiens
MACWPQLRLLLWKNLTFRRRQTCQLLLEVAWPLFIFLILISVRLSYPPYEQHECHFPNKAMPSAGTLPWVQGIICNANNPCFRYPTPGEAPGVVGNFNKSIVARLFSDARRLLLYSQKDTSMKDMRKVLRTLQQIKKSSSNLKLQDFLVDNETFSGFLYHNLSLPKSTVDKMLRADVILHKVFLQGYQLHLTSLCNGSKSEEMIQLGDQEVSELCGLPREKLAAAERVLRSNMDILKPILRTLNSTSPFPSKELAEATKTLLHSLGTLAQELFSMRSWSDMRQEVMFLTNVNSSSSSTQIYQAVSRIVCGHPEGGGLKIKSLNWYEDNNYKALFGGNGTEEDAETFYDNSTTPYCNDLMKNLESSPLSRIIWKALKPLLVGKILYTPDTPATRQVMAEVNKTFQELAVFHDLEGMWEELSPKIWTFMENSQEMDLVRMLLDSRDNDHFWEQQLDGLDWTAQDIVAFLAKHPEDVQSSNGSVYTWREAFNETNQAIRTISRFMECVNLNKLEPIATEVWLINKSMELLDERKFWAGIVFTGITPGSIELPHHVKYKIRMDIDNVERTNKIKDGYWDPGPRADPFEDMRYVWGGFAYLQDVVEQAIIRVLTGTEKKTGVYMQQMPYPCYVDDIFLRVMSRSMPLFMTLAWIYSVAVIIKGIVYEKEARLKETMRIMGLDNSILWFSWFISSLIPLLVSAGLLVVILKLGNLLPYSDPSVVFVFLSVFAVVTILQCFLISTLFSRANLAAACGGIIYFTLYLPYVLCVAWQDYVGFTLKIFASLLSPVAFGFGCEYFALFEEQGIGVQWDNLFESPVEEDGFNLTTSVSMMLFDTFLYGVMTWYIEAVFPGQYGIPRPWYFPCTKSYWFGEESDEKSHPGSNQKRISEICMEEEPTHLKLGVSIQNLVKVYRDGMKVAVDGLALNFYEGQITSFLGHNGAGKTTTMSILTGLFPPTSGTAYILGKDIRSEMSTIRQNLGVCPQHNVLFDMLTVEEHIWFYARLKGLSEKHVKAEMEQMALDVGLPSSKLKSKTSQLSGGMQRKLSVALAFVGGSKVVILDEPTAGVDPYSRRGIWELLLKYRQGRTIILSTHHMDEADVLGDRIAIISHGKLCCVGSSLFLKNQLGTGYYLTLVKKDVESSLSSCRNSSSTVSYLKKEDSVSQSSSDAGLGSDHESDTLTIDVSAISNLIRKHVSEARLVEDIGHELTYVLPYEAAKEGAFVELFHEIDDRLSDLGISSYGISETTLEEIFLKVAEESGVDAETSDGTLPARRNRRAFGDKQSCLRPFTEDDAADPNDSDIDPESRETDLLSGMDGKGSYQVKGWKLTQQQFVALLWKRLLIARRSRKGFFAQIVLPAVFVCIALVFSLIVPPFGKYPSLELQPWMYNEQYTFVSNDAPEDTGTLELLNALTKDPGFGTRCMEGNPIPDTPCQAGEEEWTTAPVPQTIMDLFQNGNWTMQNPSPACQCSSDKIKKMLPVCPPGAGGLPPPQRKQNTADILQDLTGRNISDYLVKTYVQIIAKSLKNKIWVNEFRYGGFSLGVSNTQALPPSQEVNDATKQMKKHLKLAKDSSADRFLNSLGRFMTGLDTRNNVKVWFNNKGWHAISSFLNVINNAILRANLQKGENPSHYGITAFNHPLNLTKQQLSEVAPMTTSVDVLVSICVIFAMSFVPASFVVFLIQERVSKAKHLQFISGVKPVIYWLSNFVWDMCNYVVPATLVIIIFICFQQKSYVSSTNLPVLALLLLLYGWSITPLMYPASFVFKIPSTAYVVLTSVNLFIGINGSVATFVLELFTDNKLNNINDILKSVFLIFPHFCLGRGLIDMVKNQAMADALERFGENRFVSPLSWDLVGRNLFAMAVEGVVFFLITVLIQYRFFIRPRPVNAKLSPLNDEDEDVRRERQRILDGGGQNDILEIKELTKIYRRKRKPAVDRICVGIPPGECFGLLGVNGAGKSSTFKMLTGDTTVTRGDAFLNRNSILSNIHEVHQNMGYCPQFDAITELLTGREHVEFFALLRGVPEKEVGKVGEWAIRKLGLVKYGEKYAGNYSGGNKRKLSTAMALIGGPPVVFLDEPTTGMDPKARRFLWNCALSVVKEGRSVVLTSHSMEECEALCTRMAIMVNGRFRCLGSVQHLKNRFGDGYTIVVRIAGSNPDLKPVQDFFGLAFPGSVPKEKHRNMLQYQLPSSLSSLARIFSILSQSKKRLHIEDYSVSQTTLDQVFVNFAKDQSDDDHLKDLSLHKNQTVVDVAVLTSFLQDEKVKESYV

SEQ ID NO: 3 - DNA, 3231 bp, Homo sapiens
acagggcatggtggcaggtgcctgtaatctcagttactcgggaggtggaggttgcaatgagcccagatcgcaccattgcactccagcctgggcaacaaaaggtgaaactccatctcaattaaaaaaaaaagaatgattttggtggtcgacttcaaataggtaggagaagaaggagagaggagatggagggtcagggagatctaattactctctaaaatcatgctaggaaagataacaccttttaataacactctctgcttttataacatcattctgccaaggagctcaaaggtttcaacaaagttcactttcagaaaacccctttgaggaagacagaatatacatcttctctccattttaaagatgaagaaacaggccgggcacaatggctaatgcctgtaatcccagcactttgggaggctgaggccagaggatcgcttgagctccagagtttgagaccagcctggataacatggcaaaaccctgtctctacaaaaaaaatacaaaaattagatgggtgtggtggcatgcacctgtggtcccagctacttgggaggctaaggtgggaggatcgcttgagcccagggagtcaagtctacactgagccatgattggatcactgcactccagcctgggtagacagagcaagaccctgtctcaaaaaaaagaaatgaaagagaaagaaagaaagaggagaggagaggagatgaggggaggagggagggggggaggaaggaaggaaggaaggaaggaaaaaaagatgaaaaaagaaaaaaacaagatgaaacagaggcagaaagactttacgtaaattgctcatcatgtggttgtcaagtttgaccccaaaacccaatttattgaccaaggttattctttgactgaggcaagggggtccgctctcctgggccttgggctttagaaagctcatctctggcctttctgagatccatccctttctttttatttttcttgacacggagtcttgctctgtcactcaggctggagtgcagtggcatgatctcgactcactgtaacctctgcctcccgggttcaagcgattctcctgcctcagcctcctgagataacaggcgcccgccaccacatctggctaatttttgtatttttagtaaagactgggtttcatcatgttggccaggttggtttcgaactcctgacctgaggtgagctgcccaccttggcctcccaaagtgctgggattacaggcatgagccactgcgcccagctcagatccatccctttctaagggcaaacagtccatggtgcaaaggggccatgccacccagagttatgagtacctgggactccagaattccttgcctggtggcctccacatgcacttccagggcctgcttgggcctcttctatgcgtctgtcctgagtgttgatagaaccactgatgtgagtacctgggcttgagccgtggcctggagatcctgttgactgtagcatggagggggcttgtgcagctgaatgtctgcatgcaggtggtgggagttctggaatatgatggagctggaggtgggaagagaagtaggcttggggcagctctctcatgccacctcattctggccaaaactcaggtcaaactgtgaagagtctaaatgtgaatctgcccttcaaggtggctacaaaggtatctttgtcaaggtaggagaccttgtggcctccacgtgcacttccagggcctgcttgggcctcttctacgggtctgtcctgagtcttctatgaatccttcagggcagattcatatttagactcttcacagtttgacctgagttttggccagaataaggtgacatttagtttgttggcttgatggatgacttaaatatttagacatggtgtgtaggcctgcattcctactcttgcctttttttttgcccctccagtgttttgggtagttttgctcccctacagccaaaggcaaacagagaagttggaggtctggagtggctacataattttacacgactgcaattctctggctgcacttcacaaatgtatacaaactaaatacaagtcctgtgtttttatcacagggaggctgatcaatataatgaaattaaaagggggctggtccatattgttctgtgtttttgtttgtttgttttgtttgtttctttttttgtttttgtggcctccttcctctcaatttatgaagagaagcagtaagatgttcctctcgggtcctctgagggacctggggagctcaggctgggaatctccaaggcagtaggtcgcctatcaaaaatcaaagtccaggtttgtggggggaaaacaaaagcagcccattacccagaggactgtccgccttcccctcaccccagcctaggcctttgaaaggaaacaaaagacaagacaaaatgattggcgtcctgagggagattcagcctagagctctctctcccccaatccctccctccggctgaggaaactaacaaaggaaaaaaaaattgcggaaagcaggatttagaggaagcaaattccactggtgcccttggctgccgggaacgtggactagagagtctgcggcgcagccccgagcccagcgcttcccgcgcgtcttaggccggcgggcccgggcgggggaaggggacgcagaccgcggaccctaagacacctgctgtaccctccacccccaccccaccccacccacctccccccaactccctagatgtgtcgtgggcggctgaacgtcgcccgtttaaggggcgggccccggctccacgtgctttctgctgagtgactgaactacataaacagaggccgggaagggggcggggaggagggagagcacaggctttgaccgatagtaacctctgcgctcggtgcagccgaatctataaaaggaactagtcccggcaaaaaccccgtaattgcgagcgagagtgagtggggccgggacccgcagagccgagccgacccttctctcccgggctgcggcagggcagggcggggagctccgcgcaccaacagagccggttctcagggcgctttgctccttgttttttccccggttctgttttctccccttctccggaaggcttgtcaaggggtaggagaaagagacgcaaacacaaaagtggaaaacaggtaagaggctctccagtgacttacttgggcgttattgttttgtttcgaggccaaggaggcttcgggaagtgctcggtttcggggactttgatccggagccccacatccccaccactt

SEQ ID NO: 4 - DNA, 357 bp, Homo sapiens
tggaggtctcagctgagagggctggattagcagtcctcattggtgtatggctttgcagcaataactgatggctgtttcccctcctgctttatctttcagttaatgaccagccacgggcgtccctgctgtcagctctggccgctgccttccagggctcccgagccacacgctgggcgtgctggctgagggaacatggcatgttggcctcagctgaggttgctgctgtggaagaacctcactttcagaagaagacaaacagtaagcttgggtttttcagcagcggggggttctctcattttttctttgtggttttgagttggggattggaggagggagggagggaaggaagctgtgttg

SEQ ID NO: 5 - DNA, 11754 bp, Homo sapiens
ccattccacctagtggggccatttcctacctgagtcacccgtggtgtcaaatagaatgtcatgtggcctcctgagttgggtagaattggctgctcatctcaaccccgctactgactatctctgtgatttacccttcctccagccttagccttgctacatataaaatcaagacaataatgtttcctatctcacagggttgtcctgaggattaaattaagtaattaatataaaatgtgccttgtacatattgggccctaaataaacagtagctactatttatccttaaagtacaaatggtagtttcagagcttcaaggctgatggctatttatcttactcatactctttgtttagcttcatttttttcccctaatttcattagtattttcttttcttttttttttttttttttttttttttttttggaggtgaagtctcactctgttgcccaggctggagtgcaatggagcgatcttggctcaccccaacctctgtctcctgggttcaaacagttctcctgcctcagcctcccgagtagctgggattacaggctcccgccaccatgcccagctatttttttgtattttcagtagagatggggtttcacccttttgaccaggctggtcttgaactcctgacctcatgatcaacccacctcagcctcccaaagtgctgggattacaggtgtgagccaccacgcccggcctcataagtattttctaaatttatttacagtcatgccatttaaaaggaaagttgtattcctgtctttgttaatatttataagtgattttattcagctacaagcttggaatggcatataattttgtattctgcttttttcacttaatattacatggctaatgatttctgtgtttcataaacattattctgatgatggcatgatatattgttgagtacatgtaccataattgaatcatttccctattgctatgcaattaagttgtttccaatattttgcaattataatgtttcaatgaatgaataactttatgcatatagctttttgatatcttaagttcagtttcctaggatgaatttccaggaatagtaattgggcaaatgggataaacatgactcttgaatacgtattgttaacattgctttcccaaagggctcaactgatttatatttccgtgttcattatcttttaaaccagctcatttactcaccaaacatttttaaagccattatcatgtggtaggcttagtaagaagaaagtgaccctaagggagaagcttatatataaatagggtccctggtgtaccaagtgctgatacagacacaaagtacctggggaaattgagatgagggagtcctggctcagctgggagaaaagttcattttcatagagtcatggttttgttctttggcagaaagaaaattgctttcttccccacccccacccccagctttattgaggtataattgacaaataaaaattgtatatctttaagatatgcaatgtgatatatatgtatatctcaacttaaaaaataagctacagaataaaaaggtgtttgctattaaaaaaaaagaaaaggctgaatgtcattcccaagcttggaaatttgagtatgttgcctctttgggattatttacagaaatattagcaagaccagccccatctttggtcttgagtactccactgtcagcatgctttcttccagagagggatccatttgcctttatttttcattctgttgtgccgtctatgcaaactattcttgatagttttatggtaacagtgtttttttgttccatgagataatttatacatgctcattgtggaaaatttagaaaagacaggaaagtattaaaaacatcacttttttttttttttttttttttttttttttaagagacagagtcttgctctgtcgcccaggccggagtgcagtggcgtgatctcagctcacagcaacctccgcttcccaggtttaagtgattctcctgcctcagcctcccaagtagctgggagtacaggcatgcaccaccacgcccggctaattttgtatttttagtagagatggggtttcaccatgttggccaggctggtctcaaactcctgacctcaggtgatccgcctgccttggcctcgcaaagttctgggattataggcaggagccactgcgccagccacacctacgttcttatcatcctagtacatccactgtcattatcttgctgtatttccttctgcccagtctcactctgatcatgcagtggcgtgatcatgcagtgatctcggctcactgcaacctaggccttctgggttcgagtgattctcctgccttagcctcctgggttcaagtgattctcttgccttggcctcccaagtagctgggattacaggcatacacccccatgcccatctaatttttgtatttttagtagacacagcgtttcactaaaattttgtatttttagtagagatggggtttcaccatgttggccaggctggtctccaactcctgacctcaggtgatccgcctgccttggcctcacaaagtgattacaggcatgagccactgcatccatcgccaaaaagattttttaaaagagtttaatgtagaaccatatcaaaggtctttggaaataaaaaacagttttttaaaaatatcagaaataaaacaacaaataaataaataaataaaaaacccaaaacaatctgaagcacgagcacctagcagaaaggttcaattatgatctattcatagagtggaatatcaagtagacattacaggacatgttttaagattatattttatgtcatgggaaatgctctcccagtatgatgttaaatgaaaaaacagaatacaaaagtatatatgctgcatagtctcaatattgtagagaaaaaatattatttatgtatgcatgaaaaaagacaaaagatgttaacagagatccattgttacttcagtttactagggattgtctctgggaggtaggattaaggtgatttatatttacctttttaaacttttctgtatttttttattttcaaattttccataaaaatataaggacttgaagatcaagaaaaaatttctgctttggctcagtgcagtggctcacgcctgtaatcccagcagtttgggagccctaggggagaggatcacttgaacccaagagtttgacgttccagtgagctatgatctccggatcgtaccgcctggacgatggagcaagaccctgtctcaaaaaaaaaaatctttgctttttttttttgtttgtttttgagacggagtctctctctgttgccccagctggagtacagtggcacaatctcagctcaccgcaacctctgcctcctgggttcaagcgattctcttgcctcagcctcccaagtacctgggattccatgcacccaccactatgcccagctacttttttgtattttcagtagagacagggtttcaccatgttggccaggctggtctcgaattcctgacctcagctgatccaccggccttggcctcccaaagtgctgggattacaggcatgagccactgtgcccagcccaatcttttgctttttttaaaaaaagaagacaaaaagggattttataccagtattatcttggctgtgtgactctgaagccacagttgtaagttataattactctgaaacacaaggccctgtgactcttttgggctctttggtgtttatcttgattacaacgttggaatatagaaatgaaaggaatgggagaggtgatagacttcaggcagtgtaactagttgtctgaacactactggctcaattatattgtgtctagtgatttccatcttgtccgtctgctaatttatcgcctggtaactcactgaggcagggttttcctttggagaaacctcattgttttaaccagtgtatcatgcttgtttagaagttcaatgatctttttaactcatcggagaagatgatgaccagacctggacagatggggaaggactttgcactctctctttacagtcctgagtgcacacaggtcaatatggaactatgtgtgaattttcattgtctttgagagccctcttctctgccccatagggagcagctttgtgtgcaattagaggagcaagggttgtgtgtatttagcacagcaggttggcctggtcctctcctctcaacatagtcaccacatacctggcactatgctaaggctgggaatgcagacagatgggtgcctgctttcagagtgctcaatgtgctgaggaagccagcaacagaaacagatgatttcaggagctccaggaaaatgctacaggaggagtgtgcctgggttactggagtagcacaggaggagggcttctagctcaggctgagattttagtaaaggaaattatgccacgatgaatcctgaagaatgaatagaagtgaaccagataaagcacgataggaagcatcttcccttacctaagggaagacacagaggtatatggaatggtatgttaaaaggttgggactccaaacagttctgttaaagcttagagagtggtgggagagactggagaagttgattaattagtaaatgaagttgtctgtggatttcccagatcccagtggcattggatatccgtatcattttaaattacagtgttctatcttatttccactcagtgtcagctgctgctggaagtggcctggcctctatttatcttcctgatcctgatctctgttcggctgagctacccaccctatgaacaacatgaatgtaagtaactgtggatgttgcctgagactcaccaatggcagggaaaatccaggcaattaacgtgggctaaattggacttttccaaagatgctgtctttgggaaacatcacacatgctttggatcagaaaacctaggcttctaatttgttgataaggcatgaactcaggagactgttttcagtcctagtgaatggtgataattgtaattataacagtagacaacatctcttttacacattttaaatcatgaaaatagaataaccttactgataattttagaaagtggtgattaaaagcacatttaagataatgccttaacacctagtcttttccatatgcatgatgtcttaatcacacattgcaaatcatggaacacagaattttaagcagcatttgtgtagaacttctcagttttactaatattattttattttattctcataacaaccttgaatagaactcagatcatctgtcaatcatgtattttgataacagcctttacagtgagcatagaaaatacagtagtggctaacaacacaggctccagatgtcaggttatctgggtatgaattctggtgtcagcattcactaagcatatgaccttggacaagtgatttaagtttcttttaaacagagaatagtaatacctacctcatattattattgtcagtgtatcatcttacaatcacagtctttctcttagggctgggctcagtgggtggattgacactgcagaaatggccagatctaaaggatcaacatttacgtagctgggaaatgtagctgggacttcagtttcactgcgctagtgatttttcctaccactaagcagctcagtccatacccctacgagacccacaagcttatgagatactgttcttccaggaaagcagtggggccagggccaccttttaattgtgtttcttggcctggtcccatctttctcacaatatatagcaacagttatttacttgctgattttctaatgcacatcacacatagtcatattaaacacacacacacacacacacacacacacacacccctcaagaaacattttctgagacgtgatttcctgatttcatcaaaaaagaaaagagcgggccaggcacagtgggaagtcaaggtgggtggatcacttgaggtcaggagtttgaaaccagcctggccaacacggtggaacctcgtctctactaaaaatacaaaaattagccaggcgtggtggcgcacacctgtaatcccagctactggggaggctgaggcaggagaattgcttcaacctgcgaggctgaggttgcagtgagccgagattgcgccattgcactccagcctgggcaacagagtgagactctgtctcaaaaaaaaaaaaaaaaaaaaaagcataaactgaaatttatatgcaatttatatgcctgtgagataattctgttttctcttttggaaccccaaagagatttttttgattgatgagcaaatacattttagattttatttaagcattatgccaagcaccactgaagtataagtttcaagggcaaactcagttttttcatctactagacgaatgattttctggaatgattacaagcaggcaagatggtgtagtggaaatagcaaatgtcttcggcatcagacaagttggggtttgtttgtatcctgcctctgcccttcaccgaggttgtgatcttgggcagattgttgagttttaacctagattcctctgactccagatcataaattttcagaaaagttctgaaattcttgtatatactgatggtaaatgagacttttccttacatctatgcacttctttgtttgtttgttttgagatggtcttgctctgttgcccagactggagtgcagtagtgcaatctccgctcactacaatgtctgcctcccaggttccagtgagcctcctgcctcagcctcccaaatagctgagactacaggcatgtgccaccacgtccggctaatttttgtatttttagtagagacagggttttgccatgttgaccacactggtctcgaactcctggcctcaggtgattcgcccgcctcagcctcccaaagtgctgggattacaggcatgagccaccatgcccggccatatccatgcacttcttgcaaccttaccttcttttctcatcaccctccagggacctagttggaagagcagagttaaaagttaaggtgaaacttggagaggtgtcttgtccctaggaacaaaggactggtttgaaattctctgtaaatcttccccagttcaaaccagagttatcaaggtcttaaaaacttccctgggtcctgagagcccattatattatttacttgtcttcctgtacacccactgcctagtcctgatcctacttttgtttgcaaataggatggggcacaacgtacaaggaagggcctttgccacccctgctaagggataacctgaaataccttcaccatcactgccctgtgctgcttttcacctatgccagtctgtctacagtgccagtgtctcctggcattgaaaggggagaatcttttggtcctttgagtatttggttgggttacataaatctccctgaatgaagagcagctgacttaggcaaggggccttgtttggttttccttgaactattaacaggaagatagggagattaactgtgtaaatgttcaataggccagagtccctgcagagggtggccacagtgatcagatcttatcacatccttgctttgggtgttgcctctctggttggagtatggatagaaaagaaagaaagaccctatattgaaatgcaaagtgcagcaagtcctgactttggattaacttctcagcccatttgcatgaaaataaaaagatgaataaaacaaggttcccactttggagggaggtggtagctgtgagatggaaggagtgttcctgctgggcaacagcagagtaagtgctggggtagattcactcccacagtgcctggaaaatcctcataggctcatttgttgagtctttgtcctacaccaggcactctgcaaaaacgctttgcctgcaaggtctcatgcgatgctcaccacagctctgtgaagttaattgtacttttatcaccattttacagatgagaaaactgagggtatggggtcaatgacttggctaaagtcactgcttagcaagctgcagggactggatgtgaattccaattggtttgactccaaagcctgtgaagctacttgttcttcaccacctagagctgtggttcttgataactgtgaactcttttggggtcacaaatagccctgagaatatgatagaagcaggagctctggcctttctgtccatacctgaacaggtccttgggttaagagcccctcgtccagggcctattaatcttgatcctcataagcagcatccatgtataaaggccgcaaaccaaactgtgccagaccgaatcctaggaccaagcccaaatatgtcccatcatccttttggtaagaagctcattgtaagaaagaaagaggagagcaagaggatgacctagtgcatggggcctcattgttttaattagtgacaaaacaacaataataacaacaaaacccccgaagcttcacagatgacatcagaccccaagcctgtgtgtttttcaggtgcccttgaggagctttgtagctggcagaggaggtgaaactgacaaatgtttggcagatggaggagagtaccagaggggtttgagatgagctaaattccaatctaaccgcaggtgtgaggaagaggcttggattgggaccatggagatgggggttctactcccagtcacgccagctgactttgcgagtgttctttgtcagtcactttatcttattttatttatttttatttttttgaaatggagtttcgctcttgtcgcccaggctggagtgaaatggcgcgatcttggctcactgcaacctccccctcctgagttcaagcgattctcctgcctcagcctccagagtacctgggattacaggcgcctgccaccaagcccatcgaatttttgtatgcttagtagagacagggtttcgccatgttggccagggtggtcttgaactcctgacctcaggtgatccgcccaccttggcctcccaaagtgctgggattacaggcgcgagccactgtgcccagcccacttcatcttaccgtagttacctccttagagtatgaaaaaataggcttagggcatccccaagtcccctctatgtctgagagctgaggctggctgtcaaagaggaactaaggatgccagggactttctgcttaggacccctctcatcacttctccaacgctggtatcatgaaccccattctacagatgatgtccactagattaagaatggcatgtgaggccaagtttccacctgagagtcagttttattcagaagagacaggtctctgggatgtggggaatgggacggacagacttggcatgaagcattgtataaatggagcctcaaaatcgcttcagggaattaatgtttctccctgtgtttttctactcctcgatttgaacaggccattttccaaataaagccatgccctctgcaggaacacttccttgggttcaggggattatctgtaatgccaacaacccctgtttccgttacccgactcctggggaggctcccggagttgttggaaactttaacaaatccatgtaagtatcagatcaggttttctttccaaacttgtcagttaatccttttccttcctttcttgtcctctggagaattttgaatggctggatttaagtgaagttgtttttgtaaatgcttgtgtgatagagtctgcagaatgagggaagggagaattttggagaatttggggtatttggggtatccatcacctcgagtatttatcatttctgtatgttgtgaacatttcaagtcctgtctgctagctattttggaatatactatatgttgttaatgatatcatgcagcagacgtgcatctgaatgggctggctctaggagctagagggtaggggctggcacaaagatgcatgctggaagggtccttgcccataagaagctgacagccaaggctaggggagttctgtcttctctgcatcaggtcacctctctcacctctgtcactgccccatcagactacaatgtctgcaggtctttctcccctgagtgtgagctccctgagcaaagcaggatgctgccccttccctttgtattcctggctcctggcttcagtgcctggacataagtatgggcataataagtgtcccccaaatgagacattgaggattcttcaaatgcacaggaccgtgatgtgagttaggacggagtaaggacgatgggatgtggctcaggacaatcctgaggaagctgcagctgcggcacgcagggccacactgtcatgttcatggaccctagactggctttgtagcctccatgggccccttccatacacaaatattaaaaattatatttcatgactgcattggtataaagatgaatataatccagaccagattcatgattattcatacatttttagtgtattaacttttaattctgcttttaaaataaattaaaacattctaatatgcccttaagagtatcccaggcccaggccactgagcctactgtggttcatggataagttggccctgggggcatgtgtgtgcatgcatgtgtgtgcacatgcatgatgagccgggccttgaagggtggtaagatttgggtgtgtagaccaatggagaaaggcatttggggcagtgatgatgggtgggggagggaacatggtgatgaatggagctgggtgtggggagccatgggagtgggttagggccagcctgtggaggacctgggagccaggctgagttctatgcacttggcagtcacttctgtaaagcagcagaggcagttggcctagctaaagcctttcgccttttcttgcaccctttacagtgtggctcgcctgttctcagatgctcggaggcttcttttatacagccagaaagacaccagcatgaaggacatgcgcaaagttctgagaacattacagcagatcaagaaatccagctcaagtaagtaaaaaccttctctgcatccgtttataattggaaattgacctgcaccagggaaagagagtagcccaggtgtctggggcttgttcccattagatcttccccaaggggtttttctccttggtggctggcctgtggggcccctctccaggaggcattggtgaagaaactaggggagctggttgccacagacagtgatgtactaatcttctctgggaagacagaagaaaagtccccagggaagaatactacagacttggccttagggacagctaggggtgcagattgctgccaactgcattttttctgaagttggccatatggttgcagtgaatggatttatagacagagtatttctgtgcatataagagcaattacagttgtaagttgatatggataagtgaaagttaagcacttctttctaaaaagagaatgcaattcattttcccctaatcatttcaattagtctgatgggcatttgaacttgttgtctttaaaaagtgaaatctttacctctgatctggtaagtatccaggcaatttcttgtgtgccacccaggaggtatctggggagtgggcattttctgactgaggcattggctgccatagcatcagagcagccttccaggcagtggcctggcaaggggacagaggctggtgggagcagctggctgagtgcagccagtaatggcatgtgcatggtctgtagagaatgtagaagcaataatgaagccgataaaagctggtctgcattttattattatcatgcgccggtggttctaaacaatgtcagtgataaattactcctccccatcatggaccaatggctgccactgctccagggaagtgctttttattccgtttggtgtttagggagggatggagttggctggcctttgctgaaaggcctaccagtttgttttctatttggcaaaagaagaaatgataaagt

SEQ ID NO: 6 - DNA, 571 bp, Homo sapiens
  modified_base (4): a, t, c or g
ttcntggttccgtttttttcttcctttcaggtgtcgtgaaaagcttgaattcggcgcgccagatatcacacgtgccaaggggctggctcactgatatggcgatgctcccctatctcattcctgtgtgtgtttagccaggcaactgttgatcatcaatattatgataacgtttctccactgtcccattgtgcccactttttttttttttttgaggttacttactaaataaaaataaaacactatttctcaatagacttgaagcttcaagatttcctggtggacaatgaaaccttctctgggttcctgtatcacaacctctctctcccaaagtctactgtggacaagatgctgagggctgatgtcattctccacaaggtaagctgatgcctccagcttcctcagtagggctgatggcaattacgttgtgcagctactggaaagaaatgaataaacccttgtccttgtaatggtggtgaaggggagggaggtagtttgaatacaacttcacttaattttacttccctattcaggcaggaattgccaaaccatccaggactccaatatgcaacct

SEQ ID NO: 7 - DNA, 428 bp, Homo sapiens
gtcagtaaagagacctgatgcattggactgttgcaatggaacctgttttaagatcttcaaagctgtattgatatgaagttctccaaaagacttcaaggacccagcttccaatcttcataatcctcttgtgcttgtctctctttgcatgaaatgcttccaggtatttttgcaaggctaccagttacatttgacaagtctgtgcaatggatcaaaatcagaagagatgattcaacttggtgaccaagaagtttctgagctttgtggcctaccaagggagaaactggctgcagcagagcgagtacttcgttccaacatggacatcctgaagccaatcctggtgagtagacttgctcactggagaaacttcaagcactaatgctttcggaatgtgaggcttttccttggacagcatgactttgttttgtagc

SEQ ID NO: 8 - DNA, 1402 bp, Homo sapiens
  modified_base (9): a, t, c or g
  modified_base (1391): a, t, c or g
ttcattgcntgacactttactgagaccaagatagggaacttcacataccagaccttttctcccaaggcggaagagggctgttcaatttctacactagagttcggggagttttagaaatgagccagttgtcgaggatgagagcagttcctgataggctcaaccacaatgagatgtagctgttcagagaaagcattcttatctataaactggaagataatcccggtgaaacaaagcccagccccaggggcttcactaactccaggctgtgcttctcaaactttagtgagcataggaatcacctgggcatcttgtgaagctgtagatttgaattctgcaggtcggcagaggggtctcagaatccgcatttccaacaatgtctccagtaatgctgatgctgctcgtccctggaccacagattgggtagccaggttctggcaagctcatcccaaggctttgagatgacatcagacaaaatatgttctgggacatggcttttgagaggtcaagaaaataagatgtttctttctcttctcatccccaacccttgcactgcccttttctcccttcccctaccctcctttctgtccccatccctgacgccagctgttcagcatgagaagctggagtgacatgcgacaggaggtgatgtttctgaccaatgtgaacagctccagctcctccacccaaatctaccaggctgtgtctcgtattgtctgcgggcatcccgagggaggggggctgaagatcaagtctctcaactggtatgaggacaacaactacaaagccctctttggaggcaatggcactgaggaagatgctgaaaccttctatgacaactctacaagtgagtgtccatgcagaccccagccctgtccccaaccccatccctcccttagttctggccttggcctgtgtcatctcctccctctgtagcagcgttagatgtctacatgcccatttgcccaccagactgagctcttcctagaggagagaggcttctcttgaatagctacctgtccccagttctctgaatgcagcctggcacatctcaggtgcacagtagtgtttatcaatggaatgaatgattgacagccaaccttctggttttctgggggatgtggaagggtggcttccagggtgatcaagaatgagataatggcagaaggacaaatcctgcaagatctcacttatatatggaatatatgtaaggtagaaagtgtcagtttcacatgatgaataagttcctgggatcttgatgtacatcgtgatgactatagttagtaacactgtatagtatacttgaaatttgctaagagagtagatccgaagtgttcacactacacaaaaaaggcaactatgaggtgatggatttattaacaagcttggattgnggtgatccttt

SEQ ID NO: 9 - DNA, 1809 bp, Homo sapiens
  modified_base (5): a, t, c or g
  modified_base (509): a, t, c or g
  modified_base (1398): a, t, c or g
  modified_base (1408): a, t, c or g
  modified_base (1426): a, t, c or g
  modified_base (1430): a, t, c or g
cctantttggtatttttagaaaagacagggtttttccatgttggtcaggctggtctcgaactcccaccctcaggtggttcgcccgccttggcctcccaaagtgctgggattgcaggcatgagccactgcgcccagccccaaattttggtttttgcttgaaaactgaggtctgaattcagccttctggttgcccctcaagagtcagtttaaatgttggtcatgttagttgtcagtgaaaacaatggtgaggctggcatgagagtgtgaacctggatgggagggcttgtgcttcacgaaaacatttttccagatcagctcagtcgtgagttatccgtcattgacgttataataagctctgattatttatcaagcatcattctttatagatatctcagtttaatctgagataatcttctccacatctctccacatagatgttatgaattttacttttacagaggagccaactgaggctcagataagttacttattatatgactagtagtggnagagctggggtttcaactaagaactctctggctccaaagcccttgtaagtttctatcagtatatgaccatgcatatgagcatttgtctctcctcttcttcatagctccttactgcaatgatttgatgaagaatttggagtctagtcctctttcccgcattatctggaaagctctgaagccgctgctcgttgggaagatcctgtatacacctgacactccagccacaaggcaggtcatggctgaggtaagctgcccccagcccaagactccctccccagaatctccccagaactgggggcaaaaaactcaaggtagcttcagaggtgtgcgctaagtatactcacggctcttctggaattcccagagtgaaaacctcaagtctgatgcagaccagagctgggccagctccccagtcgtgggtatagaatcatagttacaagcaggcatttcttggggatggggaggactggcacagggctgctgtgatggggtatcttttcagggaggagccaaacgctcattgtctgtgcttctcctcctttttctgcggtccctggctccccacctgactccaggtgaacaagaccttccaggaactggctgtgttccatgatctggaaggcatgtgggaggaactcagccccaagatctggaccttcatggagaacagccaagaaatggaccttgtccgggtgagtgtccctcccattattaccatgtgcctgcttgatactggagaggtgagtttctggtcactttcccaggtgtgagtgaggtgagaattctttcagtttatctagctgggggaaattgtagtgagcatagctaaaagtcacatggggcaccaacctctccatgaagtacaggccatggtgcaagagataacgcntgtgcatatnagccatcccatgcccacntcancggtccaaataagcagttttctgcaaaacttagtgagggctggtgtttggaagtggagttgagtaattgcagtaccctattttcctttttggctgcagcctctcagccagccacagcatctccctgtgtcttggtaggttttggaaagaagtgtgggagcaaaagcatgatgttacatgtagactggcctgagatactcattctcagggcactgtgtgaatgatgagctgctgttactgtgtggaggggaaatgcacttagtgcttcagagccacttgaaagggataagtgctctagagacaattggattcaaatgtggagcaggctgagcaagaacagaatgtctcctttgcctgagcctgagtgctggtaatcacat

SEQ ID NO: 10 - DNA, 9181 bp, Homo sapiens
  modified_base (48): a, t, c or g
  modified_base (4096): a, t, c or g
  modified_base (4123): a, t, c or g
tttggtccttggcaaagttcacaaatactggatttgataacaaaaggnacttaataaatgttagttgagtggttgaatgagtaaataaacctctagctttagtaaattaactctagccttattctatataggctcaagagaatatttctacccattttcttctaggttttcctatctcagtgactaatggtagcaaagcattcccttaaaaaggcattatttgtgaaacttatctaaaatcgaattcgggtccaattaaatttttgaaattttatattaaaaattatattagtagggatgggtaagaggtgttttggtctggttggttggttagttgctatgactcagaattgctaagaaaacagaaaagtaagataagatcattgttttaacctcttttcctccacaaaatcaataaataacatatccctaaattactcttagaatttctcttaaattgcagtgaaaaaccaaaatccttcattcttggttgaaggttggaaaactacgttagagaggattagagagagaggatgagcaatcgtgtagtcagcccttgcctcctagtgtaggatttgtctcagccactgcttgttgtcctggctgccaacgttctcatgaaggctgttcttctatcagtgtgtcaacctgaacaagctagaacccatagcaacagaagtctggctcatcaacaagtccatggagctgctggatgagaggaagttctgggctggtattgtgttcactggaattactccaggcagcattgagctgccccatcatgtcaagtacaagatccgaatggacattgacaatgtggagaggacaaataaaatcaaggatgggtaagtggaatcccatcacaccagcctggtcttggggaggtccagagcacctattatattaggacaagaggtactttattttaactaaaaatttggtagaaatttcaacaacaacaaaaaaactcaacttggtgtcatgattttggtgaaattggtacatgacttgctggaaggtttttcataggtcataaaataacagtatcttttgatttagcatttctactcaagggaattaattccaggaattttggtggcaggcacctgtaatcccagctactcgggaggctgaggcaggagaattgcttgaacccaggaggcagaggttgcagtgagctaagatcgcatcattgcactcccgcctgggcaataagagtgaaactccatctcaaaaaaaaaaaaagatacaaaaatagaaaaaggggcttggtaagggtagtagggttttgggcaatttttttttttttttttttttattgtatggttctaaaggaatggttgattacctgtggtttggttttaggtactgggaccctggtcctcgagctgacccctttgaggacatgcggtacgtctgggggggcttcgcctacttgcaggatgtggtggagcaggcaatcatcagggtgctgacgggcaccgagaagaaaactggtgtctatatgcaacagatgccctatccctgttacgttgatgacatgtaagttacctgcaagccactgtttttaaccagtttatactgtgccagatgggggtgtatatatgtgtgtgcatgtgcatgcatgtgtgaatgatctggaaataagatgccagatgtaagttgtcaacagttgcagccacatgacagacatagatatatgtgcacacactagtaaacctctttccttctcatccatggttgccacttttatctttttatttttatttttttttttgagatggagtctcgctctgacgcccaggctggagtgcagtggctcgatctcggctcactgcaacctttgcctcccgggttcaagctattctcctgcctcagcctccacagtagctgggactacaggctcatgctgccacgcccggctgactttttgtattttagtagagacgaggtttcaccatgttacccaggctagacttcaactcctgagctcaggcaatccaccctccttggcctcccaaagtgctgggattacaggtgtgagccactgcacccagcccaccactttaattttttacactctacccttttggtcaaaatttgctcaatctgcaagcttaaaatgtgtcatgacaaacacatgcaagcacatactcacacatagatgcagaaacagcgtctaaacttataaaagcacagtttatgtaaatgtgtgcacttcttctccctaggtggtaaaccacatttcaaaacaacccaaataaaactgaacaaagcttcttcctcttagactttttagaaaatctttcagtgctgagtcactaagctgccaagttctcattgtgggaactatgcctttggatgtaatgatttcttctaagacaatgggcggaggtgtagttattgcagacatctgaaatatgtaatgtttcttccagattctggaaattctcttattctctgtggttggtggtggtggtgggatgtgtgtgtgtgtgtgtgtgtgtgtgtgtgtgtgtgtgtagggatcaggatgcgggaggagctgggttctgcttgtattggttctctgttttgcattgaatagtgtgtttccttgtatggctatctatagcttttcaaggtcaccagaaattatcctgtttttcaccttctaaacaattagctggaatttttcaaaggaagacttttacaaagacccctaagctaaggtttactctagaaaggatgtcttaagacagggcacaggagttcagaggcattaagagctggtgcctgttgtcatgtagtgagtatgtgcctacatggtaaagctttgacgtgaacctcaagttcagggtccaaaatctgtgtgcctttttactttgcacatctgcattttctattctagcttggaatctgaaacattgacaagagctgcctgaaatgtatgtctgtggtgtgattagagttacgataagcaagtcaatagtgagatgaccttggagatgttgaacttttgtgagagaatgagttgtttttttgttttggtttttagtactttaacataatctacctttagtttaagtatcgctcacagttacctagttactgaagcaagcccccaaagaaatttggtttggcaacactttgttagcctcgtttttctctctacattgcattgctcgtgaagcattggatcatacgtacatttcagagtctagagggcctgtccttctgtggcccagatgtggtgctccctctagcatgcaggctcagaggccttggcccatcaccctggctcacgtgtgtctttctttctccccttgtccttccttggggcctccagctttctgcgggtgatgagccggtcaatgcccctcttcatgacgctggcctggatttactcagtggctgtgatcatcaagggcatcgtgtatgagaaggaggcacggctgaaagagaccatgcggatcatgggcctggacaacagcatcctctggtttagctggttcattagtagcctcattcctcttcttgtgagcgctggcctgctagtggtcatcctgaaggtaaggcagcctcactcgctcttccctgccaggaaactccgaaatagctcaacacgggctaagggaggagaagaagaaaaaaaatccaagcctctggtagagaaggggtcatacctgtcatttcctgcaatttcatccatttatagttggggaaagtgaggcccagagaggggcagtgacttgcccaaggtcaacccagccgggtagcagctaagtaggatgagagtgcagggttcatgctttccagataaccacatgctcaactgtgccatgctgtctcattggtagtggttcatggcagcatctgaaagctatttattttcttagatatattgggtggcgattcttcctaagtttctaagaacaataatcagaaggatatatattgttgcaggttagactgtctggaagcagaggctgaaatagagtttgatgtatgggtatttatgagggctcaatacctatgaagagatatggaagatgcaggattgggcagagggaggagttgaactgtgatatagggccaaccccgtggggcactctanagaatatgcagcttgttggagttgttnttcatcgagctgaaacatccagccctttgtgctcccccaaggcctccctcctgacaccacctacctcagccctctcaatcaatcactggatgtgggctgccctgggaaggtcgtgccccagggcctacatggctctctgctgctgtgacaaacccagagttgctgatgcctgaggccgtctactgacagctgggcaacaaggcttccctgaatggggactctgggcagtgcagttttgtgtctgaaccatacattaatatatttatatccgaattttctttctctgcaagcatttcatataaagacacatcaggtaaaaataaatgtttttgaagcaaaaggagtacaaagagataagaactaactaatttaatactagttaccatctgttacaaatagttcctactgattgccaaggactgtttaaacacatcacatgggcttcttcttctatcctcactaacccttttaacagacaaggaaatgaggctcaggaaggtcaaggactttattgaggttccacagtaggatacagttcttgctaaaagcaacccctccctcatgctctgttatctaactgcaaggggaaggtcagtggcagaggtagtggtcccatggttggtgcataagagctgctctgagacaactgcatgctggtgggtcctgcagacatgtacccatcagccggagataggctcaaaatatccacaagagtttggatgattgtgggaatgcagaatccatggtgatcaagagggaaagtcaagttgcctggccattttccttggcttttagacagaaaagttacgtgggatattatctcccacagctcttctgtggtgccaccagtcatagtccttatataaggagaaaccagttgaaattacctattgaagaaacaaagagcaaactcgcccactgaaatgcgtagaaagccctggactctgttgtattcataactctgccattatttttctgcgtagttttgggtaagtcacttatcttctttaggatggtaatgatcagttgcctcatcagaaagatgaacagcattacgcctctgcattgtctctaacatgagtaggaataaaccctgtcttttttctgtagatcatacaagtgagtgcttgggattgttgaggcagcacatttgatgtgtctcttccttcccagttaggaaacctgctgccctacagtgatcccagcgtggtgtttgtcttcctgtccgtgtttgctgtggtgacaatcctgcagtgcttcctgattagcacactcttctccagagccaacctggcagcagcctgtgggggcatcatctacttcacgctgtacctgccctacgtcctgtgtgtggcatggcaggactacgtgggcttcacactcaagatcttcgctgtgagtacctctggcctttcttcagtggctgtaggcatttgaccttcctttggagtccctgaataaaagcagcaagttgagaacagaagatgattgtcttttccaatgggacatgaaccttagctctagattctaagctctttaagggtaagggcaagcattgtgttttattaaattgtttacctttagtcttctcagtgaatcctggttgaattgaattgaatggaatttttccgagagccagactgcatcttgaactgggctggggataaatggcattgaggaatggcttcaggcaacagatgccatctctgccctttatctcccagctctgttggctatgttaagctcatgacaaagccaaggccacaaatagaactgaaaactcttgatgtcagagatgacctctcttgtcttccttgtgtccagtatggtgttttgcttgagtaatgttttctgaactaagcacaactgaggagcaggtgcctcatcccacaaattcctgacttggacacttccttccctcgtacagagcagggggatatcttggagagtgtgtgagcccctacaagtgcaagttgtcagatgtccccaggtcacttatcaggaaagctaagagtgactcataggatgctcctgttgcctcagtctgggcttcataggcatcagcagccccaaacaggcacctctgatcctgagccatccttggctgagcagggagcctcagaagactgtgggtatgcgcatgtgtgtgggggaacaggattgctgagccttggggcatctttggaaacataaagttttaaaagttttatgcttcactgtatatgcatttctgaaatgtttgtatataatgagtggttacaaatggaatcattttatatgttacttggtagcccaccactcccctaaagggactctataggtaaatactacttctgcaccttatgattgatccattttgcaaattcaaatttctccaggtataatttacactagaagagatagaaaaatgagactgaccaggaaatggataggtgactttgcctgtttctcacagagcctgctgtctcctgtggcttttgggtttggctgtgagtactttgccctttttgaggagcagggcattggagtgcagtgggacaacctgtttgagagtcctgtggaggaagatggcttcaatctcaccacttcggtctccatgatgctgtttgacaccttcctctatggggtgatgacctggtacattgaggctgtctttccaggtacactgctttgggcatctgtttggaaaatatgacttctagctgatgtcctttctttgtgctagaatctctgcagtgcatgggcttccctgggaagtggtttgggctatagatctatagtaaacagatagtccaaggacaggcagctgatgctgaaagtacaattgtcactacttgtacagcacttgtttcttgaaaactgtgtgccaggcagcatgcaaaatgttttatacacattgcttcatttaattctcacaaggctactctgaagtagttactataataaccagcaattttcaaatgagagaactgtgactcaaagacgttaagtaaccagctttggtcacacaactgttaaatgttggtacgtggaggtgaatccacttcggttacactgggtcaataagcccaggcgaatcctcccaatgctcacccaattctgtatttctgtgtcctcagagggggtacaactaggagaggttctgtttcctgagtacaggttgttaataattaaatatactagctctaaggcctgcctgtgatttaattagcattcaataaaaattcatgttgaatttttctttagtacttctttcttaatataatacatcttcttgaccaagtccaagaggaacctgcgttggacagttttcatatgagatcaaattctgagagagcaagatttaaccctttttggttcaccttctgatcctcccctaaggaggtatacatgaaatatttattactcctgcctgaacttctttcattgaatatgcaattttgcagcatgcagattctggatttaaattctgagtcttaacttactggctgagggaccttggataggctccttatccctcagtttcctcatctctaaaatggggatggcacctgccccgtgggttgttggaaggacttacagaggtgcagaatgtacgttgtacatagcaggtttcagcaaatgttagctccctctttccccacatccattcaaatctgttccttctccaaaggatgtgtcaaggaggaaatggacctggctgggaaaccctcagaatactgggatgatgctgagcttggctcatacctgtgctttgctttcaggccagtacggaattcccaggccctggtattttccttgcaccaagtcctactggtttggcgaggaaagtgatgagaagagccaccctggttccaaccagaagagaatatcagaaagtaagtgctgttgacctcctgctctttctttaacctagtgctgctgcctctgctaactgttgggggcaagcgatgtctcctgcctttctaaaagactgtgaaaccactccaggggcagagaaatcacatgcagtgtccctttccaaatcctcccatgccatttatgtccaatgctgttgacctattgggagttcacggtctcgatccctgagggacattttctttgttgtcttggcttctagaagagtatcttttacttgccccctcccaaacacacatttcatggtctcctaacaagctagaagaaagaggtaaagacaagcgtgattgtggaaccatagcctcgctgcctgcctgtgacatggtgacctgtgtatcagcctgtgtgggctgagaccaagtggctaccacagagctcagcctatgcttcataatgtaatcattacccagatccctaatcctctcttggctcttaactgcagacagagatgtccacagctcatcaaaggctctgccttctgggttctttgtgcttagagtggcttcctaaatatttaataggtcccttttctgccagtctcttctgtgcccatcccctgattgcccttggtaaaagtatgatgccccttagtgtagcacgcttgcctgctgttcctaatcatcttctcctacctcctctttacacctagctcctgtttcagtcacctagaaatgctcacagtcgctggaatatgtcatgttcttccacacctccatgcctttgtaggtactgtttgctctcacaggagaactttctctctaacttgcctatcttctcaactcctcctttctctccaagatctagttccggatcccctcccctgagcatccctccttggttctcaggtagtcagtcactctctgccctgaacttccatggcacgtgaaagaaaatctttttattttaaaacaattacagactcacaagaagtaatacaaattacatgagggggttcccttaaacctttcatccagtttccccaatggtagcagcatgtgtaactgtagaatagtatcaaaaccatgaaattgacataggtacaattcacaaaccttcttcagatttcactagctttatgtgcgctcatttgtgtgtgtgtgtgcgtatttagttctatgcaattttatcatgtgtgaattc

SEQ ID NO: 11 - DNA, 577 bp, Homo sapiens
  modified_base (43): a, t, c or g
  modified_base (94): a, t, c or g
  modified_base (145): a, t, c or g
  modified_base (196): a, t, c or g
  modified_base (247): a, t, c or g
  modified_base (298): a, t, c or g
ttagatctatccaagttgtgtgtgtcaacagttcattcctctntcactgctgagtagtgttccctgggaggggtgtatcacagttccatggcantttttagatgtattttttaaacagctttcagcatcctctattttaattgtntcatcaagtcctttttcccaatagactctgaatgctcctttatcatcgtanttcccatcaccaacatcagtacccaaataggccctaaataaacatttatangcctcctgcctgcctgagaaaccagggtggacatggagagaaggcacttcntgaaagttcaagcgcagtgccctgtgtccttacactccactcctcagtgctttctgtgggttcatttctgtcttctctcctgtcacagtctgcatggaggaggaacccacccacttgaagctgggcgtgtccattcagaacctggtaaaagtctaccgagatgggatgaaggtggctgtcgatggcctggcactgaatttttatgagggccagatcacctccttcctgggccacaatggagcggggaagacgaccaccatgtcaatgagggcgggtagc

SEQ ID NO: 12 - DNA, 1521 bp, Homo sapiens
gatccctgggccaagggaaggagcacatgaggagttgccgaatgtgaacatgttatctaatcatgagtgtctttccacgtgctagtttgctagatgttatttcttcagcctaaaacaagctggggcctcagatgacctttcccatgtagttcacagaattctgcagtggtcttggaacctgcagccacgaaaagatagattacatatgttggagggagttggtaattcccaggaactctgtctctaagcagatgtgagaagcacctgtgagacgcaatcaagctgggcagctggcttgattgccttccctgcgacctcaaggaccttacagtgggtagtatcaggaggggtcaggggctgtaaagcaccagcgttagcctcagtggcttccagcacgattcctcaaccattctaaccattccaaagggtatatctttggggggtgacattcttttcctgttttctttttaatctttttttaaaacatagaattaatatattatgagcttttcagaagatttttaaaaggcagtcagaaatcctactacctaacacaaaaattgtttttatctttgaataatatgttcttgtttgtccattttccatgcatgcgatgttaggcatacaaaatacattttttaaagaatactttcattgcaaattggaaacttcgtttaaaaaatgctcatactaaaattggcatttctaacccataggcccacttgtagttatttaccgaagcaaaaggacagctttgctttgtgtgggtctggtagggttcattagaaaggaatgggggcggtgggagggttggtgttctgttctctctgcagactgaatggagcatctagagttaagggtaggtcaaccctgacttctgtacttctaaatttttgtcctcaggtcaatcctgaccgggttgttccccccgacctcgggcaccgcctacatcctgggaaaagacattcgctctgagatgagcaccatccggcagaacctgggggtctgtccccagcataacgtgctgtttgacatgtgagtaccagcagcacgttaagaataggccttttctggatgtgtgtgtgtcatgccatcatgggaggagtgggacttaagcattttactttgctgtgtttttgttttttctttttttcttttttatttttttgagatggagtctcgctctgtagccaggctggactgtagtggcgcgatctcggctcactgcaaccttggcctcccaggttcaagcgattctcctgcctcagcctcccgagtagctgggactctaggcacacaccaccatgcccagctaatttttgtgtttttagtagagacggggtttcaccatgttggccaggatggtctcaatgtcttgacctcgtgatccgcccacctcggtctcccaaagtgctgggaacacaggcatgagccactgtgtctggccacattttactttctttgaatatggcaggctcacctccgtgaacaccttgagacctagttgttctttgattttag

SEQ ID NO: 13 - DNA, 6519 bp, Homo sapiens
  modified_base (3523): a, t, c or g
  modified_base (3531): a, t, c or g
  modified_base (3533): a, t, c or g
  modified_base (6325): a, t, c or g
  modified_base (6401): a, t, c or g
  modified_base (6408): a, t, c or g
  modified_base (6420): a, t, c or g
  modified_base (6442): a, t, c or g
  modified_base (6449): a, t, c or g
  modified_base (6460): a, t, c or g
  modified_base (6465): a, t, c or g
  modified_base (6483): a, t, c or g
gaaattgaaagttgtaactgcctggtgcatggtggccaggcctgctggaaacaggttggaagcgatctgtcacctttcactttgatttcctgagcagctcatgtggttgctcactgttgttctaccttgaatcttgaagattatttttcagaaattgataaagttattttaaaaagcacggggagagaaaaatatgcccattctcatctgttctgggccaggggacactgtattctggggtatccagtagggcccagagcttgacctgcctccctgtccccaggctgactgtcgaagaacacatctggttctatgcccgcttgaaagggctctctgagaagcacgtgaaggcggagatggagcagatggccctggatgttggtttgccatcaagcaagctgaaaagcaaaacaagccagctgtcaggtgcggcccagagctaccttccctatccctctcccctcctcctccggctacacacatgcggaggaaaatcagcactgccccagggtcccaggctgggtgcggttggtaacagaaacttgtccctggctgtgcccctaggtcctctgccttcactcactgtctggggctggtcctggagtttgtcttgctctgtttttttgtaggtggaatgcagagaaagctatctgtggccttggcctttgtcgggggatctaaggttgtcattctggatgaacccacagctggtgtggacccttactcccgcaggggaatatgggagctgctgctgaaataccgacaaggtgcctgatgtgtatttattctgagtaaatggactgagagagagcggggggcttttgagaagtgtggctgtatctcatggctaggcttctgtgaagccatgggatactcttctgttatcacagaagagataaagggcattgagactgagattcctgagaggagatgctgtgtctttattcatctttttgtccccaacatggtgcactaaatttatggttagttgaaagggtggatgcttaaatgaatggaagcggagaggggcaggaagacgattgggctctctggttagagatctgatgtggtacagtatgaggagcacaggcaggcttggagccaactctggctggccctgagacattgggaaagtcacaacttgcctcaccttctttgccgataataatagtggtgcttacctcatagaggattaaattaaatgagaatgcacacaaaccacctagcacaatgcctggcatatagcaagttcccaaataaaatgctactgttcttacctctgtgaggatgtggtacctatatatacaaagctttgccattctaggggtcatagccatacagggtgaaaggtggcttccaggtctcttccagtgcttacccctgctaatatctctctagtccctgtcactgtgacaaatcagaactgagaggcctcacctgtcccacatccttgtgtttgtgcctggcaggccgcaccattattctctctacacaccacatggatgaagcggacgtcctgggggacaggattgccatcatctcccatgggaagctgtgctgtgtgggctcctccctgtttctgaagaaccagctgggaacaggctactacctgaccttggtcaagaaagatgtggaatcctccctcagttcctgcagaaacagtagtagcactgtgtcatacctgaaaaaggtgagctgcagtcttggtgctgggctggtgttgggtctgggcagccaggacttgctggctgtgaatgatttctccatctccaccccttttgccatgttgaaaccaccatctccctgctctgttgcccctttgaaatcatatcatacttaaggcatggaaagctaaggggccctctgctcccattgtgctagttctgttgaatcccgttttccttttcctatgaggcacagagagtgatggagaaggtccttagaggacattattatgtcaaagaaaagagacttgtcaagaggtaagagccttggctacaaatgacctggtgttcctgctcattacttttcaatctcattgaccttaacttttaaactataaaacagccaatatttattaggcactgatttcatgccagagacactctgggcatgaaagaaagtaatgataatagttaattttatatagcgttgttaccatttacaaccttttttttttttttaacctctatcatctcaattaaagtgcagagagaccctgggaagaaggtaactatatttattatcccagatgagggaagtgaggcttgtagggaattggtagctgattcaaggtcacccagcaggtaaataacagtggtgggaccagacccaattaccaggtatgttttcctctgtaccgcagtacatgcctgagatttatttgtgtgttgaagccagtggtacctaatgtatttacatcccaacctgaaactcctatccacttatttaccttttaatgagcctcttaactcaagtgcagtctgaggaccagcagcatcaggatcacttgggaacttgttagaaattcagcaacctgggcccagctcagacctaccgaatcagaatctgtgcattttaacaaggttcttgagtggttgaacacacattaaagcatgagaagcattgaactagacatgtagccaggtaaaggccttgcctgagatggttggcaaaggcctcattgcagcattcattggcaggccacagttcttttggcagctctgcttcctgacctttcaccctcaggaagcgaggctgttcacacggcacacacatgccagacagggtcctctgaagccacggctgccagtgcatgtgtcccagggaaagctttttcctttagttctcacacaacagagcttcttggaagccctccccggcaaaggtgctggtggctctgccttgctccgtccctgacccgttctcacctccttctttgccatcaggaggacagtgtttctcagagcagttctgatgctggcctgggcagcgaccatgagagtgacacgctgaccatcggtaaggactctggggtttcttattcaggtggtgcctgagcttcccccagctgggcagagtggaggcagaggaggagaggtgcagaggctggtggcgctgactcaaggtttgctgctgggctggggctgggtggctgcgggtgtgggagcagcttggtggcgggttggcctaatgcttgctggggtgcctggggctcggtttgggagctagcagggcagtgtcccagagagctgagatgattggggtttggggaatcccttaggggagtggacactgaataccagggatgaggagctgagggccaagccaggagggtgggatttgagcttagtacataagaagagtgagagcccaggagatgaggaacagccttccagatttttcttgggtagcgtgtgtaggaggccagtgtcaccagtagcatatgtggaacagaagtcttgacccttgctatctctgcctagtcctaatggctggcttttcccaggaaggcttctgcttncatggacngntagattaaccctttatttaggtaaatgagggaacctactttataagcataggaaagggtgaagaatcttttaagattcctttactcaagttttcttttgaagaatcccagagcttaggcaatagacaccagactttgagcctcagttatccattcacccatccacccacccacccacccatccttccatcctcccatcctcccattcacccatccacccatccagctgtccacccattctacactgagtacctataatgtgcctggctttggtgatacaaaggtgaataagacatagtcctttcctttgcccccaaccctcagaccagagatgaacatgtggaatgacctaaacacctggaacaggtgtggtgtatgagcggcaggcctctgatgagagggtgggggatggccagccctcactccgaagcccctctgagttgattgagccatctttgcattctggtccctgcagatgtctctgctatctccaacctcatcaggaagcatgtgtctgaagcccggctggtggaagacatagggcatgagctgacctatgtgctgccatatgaagctgctaaggagggagcctttgtggaactctttcatgagattgatgaccggctctcagacctgggcatttctagttatggcatctcagagacgaccctggaagaagtaagttaagtggctgactgtcggaatatatagcaaggccaaatgtcctaaggccagaccagtagcctgcattgggagcaggattatcatggagttagtcattgagtttttaggtcatcgacatctgattaatgttggccccagtgagccatttaagatggtagtgggagatagcaggaaagaagtgttttcctctgtaccacagtacatgcctgagatttgtgtgttgaaaccagtggtacctaacacatttacatcccaaccttaaactcctatgcacttatttaccctttaatgagcctctttacttaagtacagtgtgaggaacagcggcatcaggatcacttgggaacttgttagaaatacagcaacttgggcccagctcagacctactgaatcagaatcaggagcaattctctggtgtgactgtgtcacagccaggtatcaactggattctcatacataggaaatgacaaacgtttatggatggatagtctacttgtgccaggtgctgagatttgttttttgttttttgatttttttttaatcactgtgacctcatttaattctcaaaaaaagatgaaaaaatgaacactcaggaatgctgacatgagattcagaatcaggggtttggggcttcaaagtccatcctctctttatccatgtaatgcctccccttagagatacaacatcacagaccttgaaggctgaaggggatataaaagctgtctggccaagtggtctccaagcttgacagtgcagcagaatcacctggggatattattaaaaataaacatactaaggtttggcttcagggcctgtgaatcagaatttctggaggtgaggccttgaagtctgtatttctattgcatactttggacacagtggtctatagactagagtttggaaatgattgcgctcattcagattctcttctgatgtttgaattgctgccatcatatttctagtgctctatttcctcctgctcattctgtcttggataacttatcatagtactagcctactcaaagatttagagccacagtcctgaaagaagccacttgactcattccctgtaggttcagaataaatttcttctgcgcagtgtctgtcatagctttttttaaatttttttttatttttgatgagactggagttttgctcttattgcccaagctggagtgcagtggtgcgattttggctcactgcaacctccacctcccaggttcaagcgattctcctgcctcagcctcccaagtagctgagattacaagcatgtgctaccacgcccagctaattttgtatttttagtagagatgggttttatccatgttggtcaggctggtctcgagctccagacctcaggtgatctgcccgcctcggcctcccaaagtgctgggattataggcctgagccacagcgctcagccataactttaatttgaaaatgattgtctagcttgatagctctcaccactgaggaaatgttctctggcaaaaacggcttctctcccaggtaactctgagaaagtgttattaagaaatgtggcttctactttctctgtcttacggggctaacatgccactcagtaatataataatcgtggcagtggtgactactctcgtaatgttggtgcttataatgttctcatctctctcattttccagatattcctcaaggtggccgaagagagtggggtggatgctgagacctcaggtaactgccttgagggagaatggcacacttaagatagtgccttctgctggctttctcagtgcacgagtattgttcctttccctttgaattgttctattgcattctcatttgtagagtgtaggtttgttgcagatggggaaggtttgttttgttgtaaataaaataaagtatgggattctttccttgtgccttcagatggtaccttgccagcaagacgaaacaggcgggccttcggggacaagcagagctgtcttcgcccgttcactgaagatgatgctgctgatccaaatgattctgacatagacccaggtctgttagggcaagatcaaacagtgtcctactgtttgaatgtgaaattctctctcatgctctcacctgttttctttggatggcctttanccaaggtgatagatccctacagagtccaaagagaagtgaggaaatggttaaagccacttgttttttgcagcatcgngcatgtnatcaaacctganagagcctatccatatcactttnctttaanagacattaaanatggntccttaatctcttttgancccattgtatttattattctttttctgcgggggtcc

SEQ ID NO: 14 - DNA, 7379 bp, Homo sapiens
tctagaaaatttttaggaacagaaaactttccagttctctcacccctgctcaaagagtgtatggctcttacattatatataactgcctgacttcatacagtatcagtacttagatcatttgaaatgtgtccacgttttaccaaaatataatagggtgagaagctgagatgctaattgccattgtgtattctcaaatatgtcaagctacgtacatggcctgtttcatagagtagtctataagaaattgatgacttgattcatccgaatggctggctgtaacacctggttacgcatgaacacctcttttcagttgtctcaagacacctttcttttctgtacttatcagacaaggactgaaaggcagagactgctactgttagacattttgagtcaagcttttccttggacatagctttgtcatgaaagccctttacttctgagaaacttctagcttcagacacatgccttcaagatagttgttgaagacaccagaagaaggagcatggcaatgccgaaaacacctaagataataggtgaccttcagtgttggcttcttgcagaatccagagagacagacttgctcagtgggatggatggcaaagggtcctaccaggtgaaaggctggaaacttacacagcaacagtttgtggcccttttgtggaagagactgctaattgccagacggagtcggaaaggattttttgctcaggtgagacgtgctgttttcgccagagactctggcttcatgggtgggctgcaggctctgtgaccagtgaaggcaggatagcatcctggtcaagatatggatgccggagccagatttatctgtatttcaatcccagttctattccttgccagttgtgtatccgctggcaagttacttctctatgcctcaatctcctcatctgtaaaatggggataataatattacctgcaatacagggttgttacgaaaataaaaatgaataggtgcttagaatggggcctgacattagtaagtgcttagttttgtgtgtgtatatgttatttttattttggaggagaacataaaaaggacaaagtgtagaaaaactggttgggtgtattcagctgtcataacatgagagttgttatgcccagatgcacttgacatgtgaatttattagaaacatgatttttctctgagttgatgtttaactcaaactgatagaaaagataggtcagaatatagttggccaacagagaagacttgttagactattgtctgcatgtcagtgtttgcatgctaacttgcttagttagaaaggttaaattttttcactctataaaatcaagaaatatagagaaaaggtctgcagagagtctttcatttgatgatgtggatattgttaagagcgggagtttggagcatacagagctcaagttgaatcctgactttgctacttattggctatatgaccttgggcaagctgcttagtctctctgatcctcagttacctttgtttgttgatgatgaccattgataacacaaccataaataatgacaacatagagatagttctcattatagtagttgttatacagaattattcactcaatgttaattttctgcattgaaatcccagaacattagaattgggggcattatttgaatctttaaggttataaggaatacatttctcagcaataaatggaaggagttttgggttaacttataaagtatacccaagtcatttttttttcagagaagatatggtagaaagtcttaggaggttgaagaaggaattggatatttattctttctgagactatcatgggagataatgactatggttgtccatgattggagccgttgctgtagagttggttttattatagtgtaggatttgaatgggccatgtgttctcagacctcagattaaaatgagaaaactgaggccagtggggagcgtgacttcacatgggtacacttgtgctagagacagaaccaggattcaggacttctggctcctggtcctgggttcatggcccaatgtagtctttctcagtcttcaggaggaggaagggcaggacccagtgttctgagtcaccctgaatgtgagcactatttacttcgtgaacttcttggcttagtgcctctgccaggtggccataacctctggccttgtgttgccagagaaaaggtttagttttcaggctccattgcttcccagctgccaagaatgccttggtgcagcacagtcataggccctgcattcctcattgccgtgctggttggtcggggaggtgggctggactcgtagggatttgccccttggccttgtttctaacacttgccgtttcctgctgtccccctgccccctccactgcctgggtaaagattgtcttgccagctgtgtttgtctgcattgcccttgtgttcagcctgatcgtgccaccctttggcaagtaccccagcctggaacttcagccctggatgtacaacgaacagtacacatttgtcaggtatgtttgtcttctacatcccaggagggggtaagattcgagcagaccaaagatgtttacgagggccaagggaatggacttcagaattacacggtggaatgaattttactgctgcggctcaggtccctgtataagctaatactgcatgcatagaacagcagcgaactaaccctgaataataggccagtcttctgttgagcctttcagcctctctcctcttcatcctactgttgtcaggaacagccacatgtgttttaggtgaaataatccacccttgcaaaaatccatgattaagttataaaatatttggatttgtggagctgtgttttaattctgtaactgagtcacagggcacactgtcaaagcatagaacctccagagacttgttttctgcaaagtataattcatgtaattattatctattctgttatatttgggatgttaggtagtgtttgttctttagataaaaatatcccccactctgtaacaatacattaaatcaaagaaaaggacaaaggatttttctgggtcttgttagcaggagctttcttcagtcctgaaagatttgtagacctgtagatgggggaactgtgtcagtgatacaaaagggaagcatttaaaaaaaaaaagtatatatatatatatatatatatgtaatgtgaattggcctctttttctctaagcccacattttcttcttacatagttcaggtttactttattttttcctttccggctgctgaccctgtattgcccgtagttgtggaacatagcatgtgtttgtgacctgtgcctgttatttttgtgctttctagttgtgcatgcaaagagtacaaagttttcttgccctttcttggaaaatcctgcttgtctgtgccaaagggataattgtgaaagcacttttgaaatacttaatgagttgattttcttcaaattaaaaaaaatatataaatgtatctgtgtatgtacatgtgtgtacacatacacacctttatacatacagcccatttaaaacaagctccactttggagtgctctacgtcaccctgatgccgaatacagggccagagtctgagatccttctgggtggtttctgtgttttgttcatttctgttttaagagcctgtcacagagaaatgcttcctaaaatgtttaatttataaaaacatttttatctctcgattactggttttaatgaattactaagctggctgcctctcatgtacccacagcaatgatgctcctgaggacacgggaaccctggaactcttaaacgccctcaccaaagaccctggcttcgggacccgctgtatggaaggaaacccaatcccgtgagtgccactttagccataagcaggcttcttgtgcttgttgcctggtttgatttctaatatgctgcatttatcaactgcatgccacattgtgaccgccagcatttgccctttgaattattattatgttttatttacaaaaagcgaaggtagtaaccgaactaaattatctaggaacaaacgtttggagagtcttctaacaccgtgcaaagcacgtcattacagacatttgtttactgatttagaaccttaatatttaatttaaatagcactttacacttactgatgaaatgcttttcctttctttctctcccagcccctgtacttaagtgcttcaataggctctcattatatatgatttttaggttttgcttatcagcttcttcgcttttataatctgaaaagatggcatatgaatttttataaaaagggacactttcttcttctcaaattgtatatttttattgtactttccttcaaaacccccttttaaaaagtaagcagtggataaataaattcagtgaagcatccatatgacccttaagtgagtgtaggggaagggaggtcaccagatcactgtgagtgaagatggtggagaggtgaggatcttatgaggccgtgctcaaggctggtagaggtgggttagtgtttccaggtttaggcagaatctcagctgaggtcatgaaacaacagtgatctctgaaaaattatggcaaggtgggaaggtgctggagaattggagagggggcaaacttgactttcaagtttcaatgggaagataggtgactctgcacaccacagaacagtgagcatgataacctgtttatacaaggttctagagcagatttctaaatggatagctactgtgtgcttgtttgttcttaattagtattggatagttactaaatacttgttagtacttagtacataatgggtggtaaatcctagcagctaatattggttcccaaataaccagatgacaaggatagagaaggacacagacacggcctatctggatttcatggtgcctttcattttccacatgaaggttgtgtagggaagatagaagcatgagatgagatgataatatagttatctggattcatcactggccagctgaaccatatgaactcatggattgatgctagcttaggaaggctctgtaggagccagaactgggctgagagccagcccatagagacaaaagaggcccggccctgacatcagagggttcaaacatgatgtctgagccccacctacagtctgccggaggtggttggaaggaagagcctttatccttacaattcttactgaaattcaaatttttaggttttgcaaaaaaatggtggacctgaaggaaatttgacaggagcatgtctcagctgtatttaaatttgtctcagccaatccccttttgaatgttcagagtgtaagcttcaggagggcagcgcgtcttagtgtgacttttctggtcagttcaggtgctttaaggagacaattagagatcaatctggaaaacttcatttgaatttttaatacataagaaaacaataagaaatagttaaaaatatatatttataatatatatatgtgtgtgtgtgtgtgtgtgtgtgtgtgtgtatatatatatattttatttatttatttttttttgagatggagtctcgctctgttgcccaggctggagtgcagtggctcaatcttggctcactgccacctctgcctcccaggttcaagtgattctcctacctcagcctcctgagtagctgggattacaagcatgtgccaccacactggctaatttttctaattttagtagagatggagtttcaccatgttggacaggatggtcttgaactcctgacttagtgatccacccgccttcgcctcccaaagttctgggattacaggcatgagccatcgtgcctggcaattatatttaatatttaataataaggaaataattgctgtaactttactttaaattgtggaattctgaaactggaagggaactggaaatgacttgttgaatcaaatcattttaaacttttattttgccagtggaaaaaataagcccccaaaagagcaggggacctgctgatgtcccacagtaattcagagctggagatgaggttgaaggctttgtgtcttatctccagggaaaatttgtagacagcgtagctctttatgtgacgagcattctcaccccagtcatcccccaattctctactcatttgagaacataaattggatcttgccagtctctactcatttttcagcacatcgagcataagatccagactctttcccaggcctctctcatctggctcctctcctcctcctttatcattactcttcttcgtagcttatcctactccagccatgctgtcttcctattattcctaaaaagtagaaatgcatttcttcctagggcctttgtacctgcacttgccatcgcttttgctcagaatgttctttttgccaagcttttgcccagcttgttctccatcattgttatgttttggctgaaatgtcttctcttagtaggttcattctccccagtcactgtctttttattttgctttattttgggccatctaaggttatcttattagtgtatttgttgttcgtctcctccatgggcatacacctccatgaaggcaggtattttcaccttaggccctcgaatatactggacagcatctggcacgtagtagatgctcaacgaatgtttgttgtgtgagcaaatggttggttgattggattgaactgagttcagtatgtaaatatttagggcctctttgcattctattttacttatgtataaaatgatacataatgatgatataaatgatgtcacagtgtacaaggctgttgtgggatcaagcaatcaaatgagatcatgcttgtcttttccaaatggtgagggaatagatgcatgtttgtggttgttacggaatgatcctgtgctcctgaggcaacagaaaggccaggccatctctggtaatcctactcttgctgtcttccctttgcagagacacgccctgccaggcaggggaggaagagtggaccactgccccagttccccagaccatcatggacctcttccagaatgggaactggacaatgcagaacccttcacctgcatgccagtgtagcagcgacaaaatcaagaagatgctgcctgtgtgtcccccaggggcaggggggctgcctcctccacaagtgagtcactttcagggggtgattgggcagaaggggtgcaggatgggctggtagcttccgcttggaagcaggaatgagtgagatatcatgttgggagggtctgtttcagtcttttttgttttttgtttttttttctgaggcggagtcttgctctgtcgcccaggctggagtgctgtggcatgatcttgcctcactgcaacctccacctcccaggttcaagcgattctcctgcctcagcctcctgagtagctgggattacaggcacgcaccaccatgtctggctaatttttgtgtttttagtagagatagggtttcgccgtgttggctaggctggtctggaat

SEQ ID NO: 15 - DNA, 5687 bp, Homo sapiens
gaattcctgacctcaggtgatccacccgcctcggcctcccaaagtgctgggattacaggcgtgagccactacgcccagccctgtttcagtctttaactcgcttcttgtcataagaaaaagcatgtgagttttgaggggagaaggtttggaccacactgtgcccatgcctgtcccacagcagtaaagtcacaggacagactgtggcaggcctggcttccaatcttggctctgcaacaaatgagctggtagcctttgacaggcctgggcctgtttcttcacctctgaattagggaggctggaccagaaaactcctgtggatcttgtcaactctggtattcttagagactctgtttgggaaggagtcctgagccattttttttttcttgagaatttcaggaagaggagtgcttatgatagctctctgctgcttttatcagcaaccaaattgcaggatgaggacaagcaattctaaatgagtacaggaactaaaagaaggcttggttaccactcttgaaaataatagctagtccaggtgcggggtggctcacacctgtaatctcagtattttgggatgccgaggtggactgatcacctaaggtcaggagttcgaaaccagcttggccaatgtggcgaaaccctgtctctactaaaaattcaaaaattagccaggcatggtggcacatgcctgtaatcccagttacttgggaggctgaagcaggagaattgcttgaacctgggaggtggaggtcgcagggagccaaaattgcgccactgtactccagcctgagcaacacagcaaaactccatatcaaaaaataaaatgaataaaataacagctaatctagtcatcagtataactccagtgaacagaagatttattaggcatagtgaatgatggtgcttcctaaaaatctcttgactacaaagaatctcatttcaatgtttattgtttagatgttcagaataaattcttgggaaagaccttggcttggtgtaagtgaattaccagtgccgagggcagggtgaaccaagtctcagtgctggttgactgagggcagtgtctgggacctgtagtcaggtttccggtcacactgtggacatggtcactgttgtccttgatttgttttctgtttcaattcttgtctataaagacccgtatgcttggttttcatgtgatgacagagaaaacaaaacactgcagatatccttcaggacctgacaggaagaaacatttcggattatctggtgaagacgtatgtgcagatcatagccaaaaggtgactttttactaaacttggcccctgccgtattattactaattagaggaattaaagacctacaaataacagactgaaacagtgggggaaatgccagattatggcctgattctgtctattggaagtttaggatattatcccaaactagaaaagatgacgagagggactgtgaacattcagttgtcagcttcaaggctgaggcagcctggtctagaatgaaaatagaaatggattcaacgtcaaattttgccacttagtagcaacttgaccaggtaactggttatccttttaaagccttagtttatctaaattgtgatattaatgttgctcttataagtttgtcatgaggactaaattaaatggtgtacatagagtgccttgggtactctctgatgggggactccatgataatttgtggtctcatggagggagctctgggaaggtttaggagcctgccttggctctgcagccttgggagagccttctagcttcccaggacatggcagcctagtgttgaatgcttggctcagcaaatgtttgttctcgtttccttcccatcaacttggtcagttggggtctttcagttaggagtatctcagtgactttaaatggcatgggcatgctggagtgatagtgaccatgagtttctaagaaagaagcataatttctccatatgtcatccacaattgaaatattattgttaattgaaaaagcttctaggccaggcacggtggctcatgcctgtaatcccagcactttaggaggccaaggcgggtggatcacttgaggtcaggagtttgagaccagcctggccaacatggggaaaccctgtctctactaaaaatacaaaataagctgggcgtggtggtgcgtgcctgtaatcccagctacttgggaggctgaggcaggagaattgcttgaatctgggaggcggaggttgcagtgagctgagttcatgccattgcattccagcctgggcaacaagagcgaaaccatctcccaaaagaaaaaaaaaagaaagaaaaagcttctagtttggttacatcttggtctataaggtggtttgtaaattggtttaacccaaggcctggttctcatataagtaatagggtatttatgatggagagaaggctggaagaggcctgaacacaggcttcttttctctagcacaaccctacaaggccagctgattctagggttatttctgtccgttccttatatcctcaggtggatatttactccttttgcatcattaggaataggctcagtgctttctttgaactgattttttgtttctttgtctctgcagcttaaagaacaagatctgggtgaatgagtttaggtaagttgctgtctttctggcacgtttagctcagggggaggatggtgttgtaggtgtcttggattgaagaaagccttggggattgtttgtcactcacacacttgtgggtgccatctcactgtgaggaggacagaagccctgtgaacatgtggagcacacaggggcacagacagatttagattaggcctgctttatagagtttctgcctagagcatcatggctcagtgcccagcagcccctccagaggcctctgaaatatttgatatactgatttccttgaggagaatcagaaatctcctgcaggtgtctagggatttcaagtaagtagtgttgtgaggggaatacctacttgtactttccccccaaaccagattcccgaggcttcttaaggactcaaggacaatttctaggcatttagcacgggactaaaaaggtcttagaggaaataagaagcgccaaaaccatctctttgcactgtatttcaacccatttgtccttctgggttttgaaggaacaggtgggactggggacagaagagttcttgaagccagtttgtccatcatggaaaatgagataggtgatgtggctacgtcagggggcccgaaggctccttgttactgatttccgtcttttctctctgccttttccccaagggccaggacccctggatctctgggcagagcagacgcaggcccctataatagccctcatgctagaaaggagccggagcctgtgtataaggccagcgcagcctactctggacagtgcagggttcccactctcccaactccccatctgcttgcctccagacccacattcacacacgagccactgggttggaggagcatctgtgagatgaaacaccattctttcctcaatgtctcagctatctaactgtgtgtgtaatcaggccaggtcctccctgctgggcagaaaccatgggagttaagagattgccaacatttattagaggaagctgacgtgtaacttctgaggcaaaatttagccctcctttgaacaggaatttgactcagtgaaccttgtacacactcgcactgagtctgctgctgatgatactgtgcaccccactgtctgggttttaatgtcaggctgttcttttaggtatggcggcttttccctgggtgtcagtaatactcaagcacttcctccgagtcaagaagttaatgatgccatcaaacaaatgaagaaacacctaaagctggccaaggtaaaatatctatcgtaagatgtatcagaaaaatgggcatgtagctgctgggatataggagtagttggcaggttaaacggatcacctggcagctcattgttctgaatatgttggcatacagagccgtctttggcatttagcgatttgagccagacaaaactgaattacttagttgtacgtttaaaagtgtaggtcaaaaacaaatccagaggccaggagctgtggctcatgcctgtaatcctagcactttgggaggccgaagcgggtggatcacttgaggtcaggagttcgagaccagcctggcctacatgacaaaaccccgtatctactaaaaatacaaaaaaattagctgggcttggtggcacacacctgtaatcccagctacttgggaggctgaggcaggagaattgcttgaaccctgtaggaagaggttgtagtgagccaagatcgcaccgttgcactccagcctgggcaacaagagcaaaactccatctcaaaaaacaaattaaatccagagatttaaaagctctcagaggctgggcgcggtggcttacacctgttatcccagcattttgggatgccgaggcgggcaaagcacaaggtcaggagtttgagaccagcctggccaacatagtgaaaccctgtctctgctaaaaacatagaaaaattagccgggcatggtggcgtgcgcctgtaatcccagctactcgggaggctgaggtgagagaattacttgaacccgggaggcggaggttgcagtgagcccagattgcaccactgcactccagcctgggcgacagagcaagactccatctcaaaaaaagctctcagaacaaccaggtttacaaatttggtcagttggtaaataaactgggtttcaaacatactttgctgaaacaatcactgactaaataggaaatgaatcttttttttttttttttaagctggcaagctggtctgtaggacctgataagtactcacttcatttctctgtgtctcaggtttcccatttttaggtgagaattaaggggctctgataaaacagaccctaggattgtggacagcagtgatagtcctagagtccacaagtctgcttttgagtgatgggcccatgtatctggcacatctgcaggcagagcgtggttctggctcttcagatgatgccggtggagcactttgaggagtcctcaccccaccgtgataaccagacattaaaatcttggggctttgcatcccaggatttctctgtgattccttctagacttgtggcatcatggcagcatcactgctgtagatttctagtcacttggttctcaggagccgtttatttaatggcttcacatttaatttcagtgaacaaggtagtggcattgctcttcacagggccgtcctgttgtccacaggttccagattgactgttgccccttatctatgtgaacagtcacaactgaggcaggtttctgttgtttacaggacagttctgcagatcgatttctcaacagcttgggaagatttatgacaggactggacaccaaaaataatgtcaaggtaaaccgctgtctttgttctagtagctttttgatgaacaataatccttatgtttcctggagtactttcaactcatggtaaagttggcaggggcattcacaacagaaaagagcaaactattaactttaccagtgaggcagtacggtgtagtgtagtgattcagagaatttgctttgccaccagacataccaggtaaccttgactaagttacttaacctatctaaacctcagttccctcatctgtgaaatggagacagtaatcatagctatttccaaactgttgtgagaattc

SEQ ID NO: 16 - DNA, 1663 bp, Homo sapiens
gaattcatataaagtgagttcaaaaattgttaattaaattataatttaattataagtgtttaatcagtttgatttgtttaaaaaccactgttttaaatttggtggaatatgtttttattagcttgtatctttaattcctaaattaagctgtgtgtgtgtgtgtgtgtgtgtgtgtgtgtgtgtgtgtgtgaagtttaaagccaggatgagctagtttaaagtatgcagcctttggagtcatacagatctgggtttgaatctggtctctaaactttatagatgtatgatattaaatgaggcagttcatgtaaattgccaagcccagcactcagcacagagttgatatttcacacacattagatacctttcctgtatgtggagcatggcagttcctgtttctgctttactcctacaggatactaatataggacactaggatctttataccaagaccccatgtaatgggcttatgagaccattcttcttataaaaatctgacagaatttttgtatgtgttagatcaataggctgcatactgttattttcaagttgatttacagccagaaatattaatttatttgagtagttacagagtaatatttctgctctcatttagttttcaagccccactagtcctttgtgtgtgaaaatttacaacttactgctcttacaaggtcatgaacagtggaccaaagtgaatgccattaaccactctgacttccttcattagttttattgtgacagtggactcttttgacctcagtaataccagtttggcatttacattgtcatatttttagacttaaaaatgatcatcttaaccctgaataaaatgtgtctggtgaacagatgttttttcttgggctgtgcctcagatatctcctgtgtgtgtgtacgtgtgtgtttgtctgtgtgtccatgtcctcactgattgagccctagctgcatcaaagacccctcagattttcacacgctttttctctccaggatgaccacatcagtggatgtccttgtgtccatctgtgtcatctttgcaatgtccttcgtcccagccagctttgtcgtattcctgatccaggagcgggtcagcaaagcaaaacacctgcagttcatcagtggagtgaagcctgtcatctactggctctctaattttgtctgggatatggtaaggacacaggcctgctgtatctttctgatgtctgtcagggccatggattgatatggataagaaagaaagagctctggctatcatcaggaaatgttccagctactctaaagatgtatgaaaaagaaatagccagaggcaggtgatcactttcatgacaccaaacacagcattgggtaccagagttcatgtcacaccagagggaaaattctgtacacaatgatgaaaattaataccactaccacttaagttcctatgtgacaactttcccaagaatcagagagatacaagtcaaaactccaagtcaatgcctctaacttctctgatgggttttaacctccagagtcagaatgttctttgccttactaggaaagccatctgtcatttgaaaactctgtacattttatcagcagcttatccatccattgcaaatatgtttttgtgccagccacaatatattgcttctatttggaccaatagggggatttgaaggaattc

SEQ ID NO: 17 - DNA, 1279 bp, Homo sapiens
gaattctcataattgtcctatcgtcaagtctttatttctgcattttactgcttgatacactgtcaggacagactttaaaattattctcagtgcgatgaaacaattctgacattcatgttatgagcagttacctcataaatagattacatgtgagattgaacttgggcagactataatatagcattaatgacgaaacagacacagtcatcttcgggaagaagaatagaggcttatttgctgcctgtgaaattaaaattactctgactgggaatccatcgttcagtaagtttactgagtgtgacaccttggcttgactgttggaaagacagaaagggcatgtagtttataaaatcagccaaggggaaaatgcttgtcaaaatgtattgtcgggtattttgattaatagtttatgtggcttcattaattcagagttactctccaatatgtttatctgccctttcttgtctgataatggtgaaaacttgtgtgatgcattgtatatttgatttaggggtgaactggatgtctttgttttcacttttagtgcaattacgttgtccctgccacactggtcattatcatcttcatctgcttccagcagaagtcctatgtgtcctccaccaatctgcctgtgctagcccttctacttttgctgtatgggtaagtcacctctgagtgagggagctgcacagtggataaggcatttggtgcccagtgtcagaaggagggcagggactctcagtagacacttatctttttgtgtctcaacaggtggtcaatcacacctctcatgtacccagcctcctttgtgttcaagatccccagcacagcctatgtggtgctcaccagcgtgaacctcttcattggcattaatggcagcgtggccacctttgtgctggagctgttcaccgacaatgtgagtcatgcagagagaacactcctgctgggatgagcatctctgggagccagaggacagtgtttaattgtgatcttattccacttgtcagtggtattgacactgctgactgccttgtcctgtcttcagagtctgtcttccctgagaaggcaaagcacctttctttcttgctgtgccttacattttgctggtcaagcctttcagtttcttttgacagttttttttacttctttcttttttcaatgttgctcttaccaagagtagctcctctgccttccactttacacatgagagctgggcgacgccattcagtcctaaggcttttaccatcacctctcttggtgtttttattgtcatctctaa

SEQ ID NO: 18 - DNA, 395 bp, Homo sapiens
tagaagctgaataatatcaatgatatcctgaagtccgtgttcttgatcttcccacatttttgcctgggacgagggctcatcgacatggtgaaaaaccaggcaatggctgatgccctggaaaggtttggtgagtgaagcagtggctgtaggatgctttaatggagatggcactctgcataggccttggtaccctgaactttgttttggaaagaagcaggtgactaagcacaggatgttcccccacccccatgcccagtaacagggctcatgccaacacagctggttgtggcatgggttttgtgacacaaccatttgtctgtgtctctgatagcattagaaaagtaaagggcagttttaaggtaaggaaaatagtgttatttgcttggatccactgg

SEQ ID NO: 19 - DNA, 1124 bp, Homo sapiens
tttaattgattcactaggatatatgctactgaaaggggaatctgcttaaagtgctttctgatatttattattactaaaacttagaatttattaaaaatactgactgtgaaaaattacttgggtcgtttgcctttttaaaaggatttttggcatgtctcattaaaaaaagaaatactagatatcttcagtgaagttacaaatcgaatacacattggctctgaaattctgattgatactgggtcataaaaagttttcccaaatcagacttggaaagtgatcactctcttgttactcttttttccttgtcatgggtgatagccatttgtgtttattggaagatcggtgaattttaaggaacataggcccaaatttgaggaagggccatggtttttgatccctccattctgaccggatctctgcattgtgtctactaggggagaatcgctttgtgtcaccattatcttgggacttggtgggacgaaacctcttcgccatggccgtggaaggggtggtgttcttcctcattactgttctgatccagtacagattcttcatcaggcccaggtgagctttttcttagaacccgtggagcacctggttgagggtcacagaggaggcgcacagggaaacactcaccaatgggggttgcattgaactgaactcaaaatatgtgataaaactgattttcctgatgtgggcatcccgcagccccctccctgcccatcctggagactgtggcaagtaggttttataatactacgttagagactgaatctttgtcctgaaaaatagtttgaaaggttcatttttcttgttttttcccccaagacctgtaaatgcaaagctatctcctctgaatgatgaagatgaagatgtgaggcgggaaagacagagaattcttgatggtggaggccagaatgacatcttagaaatcaaggagttgacgaaggtgagagagtacaggttacaatagctcatcttcagtttttttcagctttatgtgctgtaacccagcagtttgctgacttgcttaataaaagggcatgtgttcccaaaatgtacatctataccaaggttctgtcaattttattttaaaaacaccatggagacttcttaaagaattc

SEQ ID NO: 20 - DNA, 618 bp, Homo sapiens
  modified_base (527): a, t, c or g
gtgcctgctcccaccacacgagtcccttctccctgctttggctcctcaccagttgtcaggttatgattatagaatctagtcctactcagtgaaagaactttcatacatgtatgtgtaggacagcatgataaaattcccaagccagaccaaagtcaaggtgctttttatcactgtaggttggtgagtgggcgattcggaaactgggcctcgtgaagtatggagaaaaatatgctggtaactatagtggaggcaacaaacgcaagctctctacagccatggctttgatcggcgggcctcctgtggtgtttctggtataactgtggatggaaaactgttgttctggcctgagtggaaaacatgactgttcaaaagtcctatatgtccagggctgttgtatgattggcttgtcttcccccagggacagcagagcaaccttggaaaagcagagggaagcttctcccttggcacacactggggtggctgtaccatgcctgcagatgctcccaaatagaggcactccaagcacntttgtttcttagcgtgattgaggctggatatgtgatttgatctttctctggaacattctttctaatcatctttgtgttcattccctgaaaa

SEQ ID NO: 21 - DNA, 1327 bp, Homo sapiens
  modified_base (72): a, t, c or g
  modified_base (206): a, t, c or g
  modified_base (808): a, t, c or g
  modified_base (811): a, t, c or g
  modified_base (849): a, t, c or g
  modified_base (916): a, t, c or g
  modified_base (935): a, t, c or g
  modified_base (940): a, t, c or g
aaaggaatttcaccccaatcttatactgacttcaatagagctttcagacaaaaagttgttttgtatatactnatcagtcatgaaaagataattacaactaaatggcctttttccttccctatttatttggagaaatttaattacataagaaagtactcagaatatgtgagtttcctgcatcaataagacatttataataatgaccntgtttacaaatgaatttgaaagttactctaattctttgattcatcaagaaataactagaatggcaagttaaaatttaagctgtttcaaagatgcttctgcatttaaaaacaaatttatctttgattttttttccccccagcaaataagacttattttattctaattacaggatgaacccaccacaggcatggatcccaaagcccggcggttcttgtggaattgtgccctaagtgttgtcaaggaggggagatcagtagtgcttacatctcataggtccgtagtaaagtcttgggttcctcactgtgggatgttttaactttccaagtagaatatgcgatcattttgtaaaaattagaaaatacagaaaagcaaagagtaaaacaattattacctgaaattatatatgcatattcttacaaaaatgcaagcccagtataaatactgctctttttcacttaatatattgtaaacattattccaagtcagtgcatttaggtgtcatttcttatagctggatagtattccattaggatatactcttatttaactattcccccttttgtagacatttggattatttccaacttgttcacaattgtanacnccaccacactgaacagcatcatccctatatccacatgnacttgtaacagaatacaattccctaggaagctggaatgctggaagtcatggtgatgttctcatggtnacagagaatctctctaganctaanacctctctctgttttaccgcagtatggaagaatgtgaagctctttgcactaggatggcaatcatggtcaatggaaggttcaggtgccttggcagtgtccagcatctaaaaaataggtaataaagataatttctttgggatagtgcctagtgagaaggcttgatatttattcttttgtgagtatataaatggtgcctctaaaataaagggaaataaaactgagcaaaacagtgtagtggaaagaatgagggctttgaagtccgaactgcattcaaattctgtctttaccatttactggttctgtgactcttgggcaagttacttaactactgtaagagttagtttccctggaagatctacctcctagctttgtgctatagatgaaatg

SEQ ID NO: 22 - DNA, 5352 bp, Homo sapiens
  modified_base (374): a, t, c or g
aagtctatttttaagttgttattgcttttttcaagtattcttccctccttcacacacagttttctagttaatccatttatgtaattctgtatgctcctacttgacctaatttcaacatctggaaaaatagaactagaataaagaatgagcaagttgagtggtatttataaaggtccatcttaatcttttaacaggtatttgtgaactttgccaaggaccaaagtgatgatgaccacttaaaagacctctcattacacaaaaaccagacagtagtggacgttgcagttctcacatcttttctacaggatgagaaagtgaaagaaagctatgtatgaagaatcctgttcatacggggtggctgaaagtaaagaggnactagactttcctttgcaccatgtgaagtgttgtggagaaaagagccagaagttgatgtgggaagaagtaaactggatactgtactgatactattcaatgcaatgcaattcaatgcaatgaaaacaaaattccattacaggggcagtgcctttgtagcctatgtcttgtatggctctcaagtgaaagacttgaatttagttttttacctatacctatgtgaaactctattatggaacccaatggacatatgggtttgaactcacactttttttttttttttgttcctgtgtattctcattggggttgcaacaataattcatcaagtaatcatggccagcgattattgatcaaaatcaaaaggtaatgcacatcctcattcactaagccatgccatgcccaggagactggtttcccggtgacacatccattgctggcaatgagtgtgccagagttattagtgccaagtttttcagaaagtttgaagcaccatggtgtgtcatgctcacttttgtgaaagctgctctgctcagagtctatcaacattgaatatcagttgacagaatggtgccatgcgtggctaacatcctgctttgattccctctgataagctgttctggtggcagtaacatgcaacaaaaatgtgggtgtctctaggcacgggaaacttggttccattgttatattgtcctatgcttcgagccatgggtctacagggtcatccttatgagactcttaaatatacttagatcctggtaagaggcaaagaatcaacagccaaactgctggggctgcaagctgctgaagccagggcatgggattaaagagattgtgcgttcaaacctagggaagcctgtgcccatttgtcctgactgtctgctaacatggtacactgcatctcaagatgtttatctgacacaagtgtattatttctggctttttgaattaatctagaaaatgaaaagatggagttgtattttgacaaaaatgtttgtactttttaatgttatttggaattttaagttctatcagtgacttctgaatccttagaatggcctctttgtagaaccctgtggtatagaggagtatggccactgccccactatttttattttcttatgtaagtttgcatatcagtcatgactagtgcctagaaagcaatgtgatggtcaggatctcatgacattatatttgagtttctttcagatcatttaggatactcttaatctcacttcatcaatcaaatattttttgagtgtatgctgtagctgaaagagtatgtacgtacgtataagactagagagatattaagtctcagtacacttcctgtgccatgttattcagctcactggtttacaaatataggttgtcttgtggttgtaggagcccactgtaacaatactgggcagcctttttttttttttttaattgcaacaatgcaaaagccaagaaagtataagggtcacaagtctaaacaatgaattcttcaacagggaaaacagctagcttgaaaacttgctgaaaaacacaacttgtgtttatggcatttagtaccttcaaataattggctttgcagatattggataccccattaaatctgacagtctcaaatttttcatctcttcaatcactagtcaagaaaaatataaaaacaacaaatacttccatatggagcatttttcagagttttctaacccagtcttatttttctagtcagtaaacatttgtaaaaatactgtttcactaatacttactgttaactgtcttgagagaaaagaaaaatatgagagaactattgtttggggaagttcaagtgatctttcaatatcattactaacttcttccactttttccaaaatttgaatattaacgctaaaggtgtaagacttcagatttcaaattaatctttctatattttttaaatttacagaatattatataacccactgctgaaaaagaaaaaaatgattgttttagaagttaaagtcaatattgattttaaatataagtaatgaaggcatatttccaataactagtgatatggcatcgttgcattttacagtatcttcaaaaatacagaatttatagaataatttctcctcatttaatatttttcaaaatcaaagttatggtttcctcattttactaaaatcgtattctaattcttcattatagtaaatctatgagcaactccttacttcggttcctctgatttcaaggccatattttaaaaaatcaaaaggcactgtgaactattttgaagaaaacacaacattttaatacagattgaaaggacctcttctgaagctagaaacaatctatagttatacatcttcattaatactgtgttaccttttaaaatagtaattttttacattttcctgtgtaaacctaattgtggtagaaatttttaccaactctatactcaatcaagcaaaatttctgtatattccctgtggaatgtacctatgtgagtttcagaaattctcaaaatacgtgttcaaaaatttctgcttttgcatctttgggacacctcagaaaacttattaacaactgtgaatatgagaaatacagaagaaaataataagccctctatacataaatgcccagcacaattcattgttaaaaaacaaccaaacctcacactactgtatttcattatctgtactgaaagcaaatgctttgtgactattaaatgttgcacatcattcattcactgtatagtaatcattgactaaagccatttgtctgtgttttcttcttgtggttgtatatatcaggtaaaatattttccaaagagccatgtgtcatgtaatactgaaccactttgatattgagacattaatttgtaccctgtgttattatctactagtaataatgtaatactgtagaaatattgctctaattcttttcaaaattgttgcatcccccttagaatgtttctatttccataaggatttaggtatgctattatcccttcttataccctaagatgaagctgtttttgtgctctttgttcatcattggccctcattccaagcactttacgctgtctgtaatgggatctatttttgcactggaatatctgagaattgcaaaactagacaaaagtttcacaacagattttctaagttaaatcattttcattaaaaggaaaaaagaaaaaaaatttttgtatgtcaataacctttatatgaagtattaaaatgcatatttctatgttgtaatataatgagtcacaaaataaagctgtgacagttctgttggtctacagaaatttacttttgtgcatttgtggcaccacctactgttgaagggttataaagccattagaaaagtagaggggaagtgatttggatcaaaaggaaaaactttagaaaagattcaaatgttcccttaatcataaaagagaactgaggggactacttgaaaataaaaggttgttttgtattttcatgttggttaagatactgagtaactggtattaagtgttagaggtttttagataaatattctgcttaatgattatgaagctgcactgagatttctgaaaatgctctgtagctgagcttatttaataaatgttcacttggtataggggaagctacaaaggcagccttcagtgtccttttgtttattcaaccaaaaatataaggacacaatgtagcagttatactgggaaggtgctgggggtggtggcaatggtgagcaggaaggcgaagtagatatggaaacagaaatgatactaatatcggtgattccttccttttttcctgtaataagtgctgtgcagacaacatatgagcagtgctgataaatgtaaatgtatttttcatagctcattaagaatcagtttcagaaagagatgtctgcttattttgctacttgaagaatccctgtcaaacagtccttttgaggaagtacaagaggctgtctctatttgtgacctcaggaatggctgtgacagtgtcgtgagcagtccttttcctgtggcacagatctgaactttgtgtgcagaaaaatcttggcttcaagtgagccaagatgccccctgagcatcagcatcacaacttcatcctcctatcttgaagttcatgttatagtgactttaatgaaatcatagaacactgtttcttcgtgaacaatgacgagggagaggaaaaaactttattgaaaaataaaaaggcaggtaatttagatgaaaatatgttacccatgaggttttgtttttgctttttgtttttgtttttgagaaacagaatctcgctctgtcgtccaggctggagtgcagcggcatgatcttggctcactgcaacctccgcctcccgggttcaagcgattctcctcagcttcccaagtagctggtactacaggcatgcgccaccacaaccagctaatttttgtatttttagtagagatggggtttcactatacgttggccaggctggtctcaaactcctgacctaaggtgatccttctgccttgggctcccaaagtgctgggattacaggcatgagccaccttgcctggccctacccatgagccttgactaaaacattcttctatctgtagaaaagcccaaaagaacttttccagattcaaaaaacttggcactttgtaatggtaatgtttacattaagtaaaaaaaaaaaaaaaaaacccacttagcttcagttttcaagtgtttactgtgttgtcatgcacttcatttaattctcaacacctgccctatgaggtaaaaagtaccattttacatatgagtaaattacagctcagtggataagaaactcgtccaaaggtacaggttcagtcaagtggcagagggttctttttgttgaagttaggtatcagttaaaattgaccttgtaaaatcacatcagcatcaatatacattaatttaacaaatatttattgaactttactgtatgccagatacttctctaggtactagggggtacaatgtagaagaaaatagaattc

SEQ ID NO: 23 - DNA, 2893 bp, Homo sapiens
acagggcatggtggcaggtgcctgtaatctcagttactcgggaggtggaggttgcaatgagcccagatcgcaccattgcactccagcctgggcaacaaaaggtgaaactccatctcaattaaaaaaaaaagaatgattttggtggtcgacttcaaataggtaggagaagaaggagagaggagatggagggtcagggagatctaattactctctaaaatcatgctaggaaagataacaccttttaataacactctctgcttttataacatcattctgccaaggagctcaaaggtttcaacaaagttcactttcagaaaacccctttgaggaagacagaatatacatcttctctccattttaaagatgaagaaacaggccgggcacaatggctaatgcctgtaatcccagcactttgggaggctgaggccagaggatcgcttgagctccagagtttgagaccagcctggataacatggcaaaaccctgtctctacaaaaaaaatacaaaaattagatgggtgtggtggcatgcacctgtggtcccagctacttgggaggctaaggtgggaggatcgcttgagcccagggagtcaagtctacactgagccatgattggatcactgcactccagcctgggtagacagagcaagaccctgtctcaaaaaaaagaaatgaaagagaaagaaagaaagaggagaggagaggagatgaggggaggagggagggggggaggaaggaaggaaggaaggaaggaaaaaaagatgaaaaaagaaaaaaacaagatgaaacagaggcagaaagactttacgtaaattgctcatcatgtggttgtcaagtttgaccccaaaacccaatttattgaccaaggttattctttgactgaggcaagggggtccgctctcctgggccttgggctttagaaagctcatctctggcctttctgagatccatccctttctttttatttttcttgacacggagtcttgctctgtcactcaggctggagtgcagtggcatgatctcgactcactgtaacctctgcctcccgggttcaagcgattctcctgcctcagcctcctgagataacaggcgcccgccaccacatctggctaatttttgtatttttagtaaagactgggtttcatcatgttggccaggttggtttcgaactcctgacctgaggtgagctgcccaccttggcctcccaaagtgctgggattacaggcatgagccactgcgcccagctcagatccatccctttctaagggcaaacagtccatggtgcaaaggggccatgccacccagagttatgagtacctgggactccagaattccttgcctggtggcctccacatgcacttccagggcctgcttgggcctcttctatgcgtctgtcctgagtgttgatagaaccactgatgtgagtacctgggcttgagccgtggcctggagatcctgttgactgtagcatggagggggcttgtgcagctgaatgtctgcatgcaggtggtgggagttctggaatatgatggagctggaggtgggaagagaagtaggcttggggcagctctctcatgccacctcattctggccaaaactcaggtcaaactgtgaagagtctaaatgtgaatctgcccttcaaggtggctacaaaggtatctttgtcaaggtaggagaccttgtggcctccacgtgcacttccagggcctgcttgggcctcttctacgggtctgtcctgagtcttctatgaatccttcagggcagattcatatttagactcttcacagtttgacctgagttttggccagaataaggtgacatttagtttgttggcttgatggatgacttaaatatttagacatggtgtgtaggcctgcattcctactcttgcctttttttttgcccctccagtgttttgggtagttttgctcccctacagccaaaggcaaacagagaagttggaggtctggagtggctacataattttacacgactgcaattctctggctgcacttcacaaatgtatacaaactaaatacaagtcctgtgtttttatcacagggaggctgatcaatataatgaaattaaaagggggctggtccatattgttctgtgtttttgtttgtttgttttgtttgtttctttttttgtttttgtggcctccttcctctcaatttatgaagagaagcagtaagatgttcctctcgggtcctctgagggacctggggagctcaggctgggaatctccaaggcagtaggtcgcctatcaaaaatcaaagtccaggtttgtggggggaaaacaaaagcagcccattacccagaggactgtccgccttcccctcaccccagcctaggcctttgaaaggaaacaaaagacaagacaaaatgattggcgtcctgagggagattcagcctagagctctctctcccccaatccctccctccggctgaggaaactaacaaaggaaaaaaaaattgcggaaagcaggatttagaggaagcaaattccactggtgcccttggctgccgggaacgtggactagagagtctgcggcgcagccccgagcccagcgcttcccgcgcgtcttaggccggcgggcccgggcgggggaaggggacgcagaccgcggaccctaagacacctgctgtaccctccacccccaccccaccccacccacctccccccaactccctagatgtgtcgtgggcggctgaacgtcgcccgtttaaggggcgggccccggctccacgtgctttctgctgagtgactgaactacataaacagaggccgggaagggggcggggaggagggagagcacaggctttgaccgatagtaacctctgcgctcggtgcagccgaatctataaaaggaactagtcccggcaaaaacccc

SEQ ID NO: 24 - DNA, 221 bp, Homo sapiens
gtaattgcgagcgagagtgagtggggccgggaccggcagagccgagccgacccttctctcccgggctgcggcagggcagggcggggagctccgcgcaccaacagagccggttctcagggcgctttgctccttgttttttccccggttctgttttctccccttctccggaaggcttgtcaaggggtaggagaaagagacgcaaacacaaaagtggaaaacag

SEQ ID NO: 25 - DNA, 158 bp, Homo sapiens
ttaatgaccagccacggcgtccctgctgtcagctctggccgctgccttccagggctcccgagccacacgctgggcgtgctggctgagggaacatggcatgttggcctcagctgaggttgctgctgtggaagaacctcactttcagaagaagacaaaca

SEQ ID NO: 26 - DNA, 159 bp, Homo sapiens
ttaatgaccagccacgggcgtccctgctgtcagctctggccgctgccttccagggctcccgagccacacgctgggggtgctggctgagggaacatggcatgttggcctcagctgaggttgctgctgtggaagaacctcactttcagaagaagacaaaca

SEQ ID NO: 27 - DNA, 1269 bp, Homo sapiens
gtaagtatcagatcaggttttctttccaaacttgtcagttaatccttttccttcctttcttgtcctctggagaattttgaatggctggatttaagtgaagttgtttttgtaaatgcttgtgtgatagagtctgcagaatgagggaagggagaattttggagaatttggggtatttggggtatccatcacctcgagtatttatcatttctgtatgttgtgaacatttcaagtcctgtctgctagctattttggaatatactatatgttgttaatgatatcatgcagcagacgtgcatctgaatgggctggctctaggagctagagggtaggggctggcacaaagatgcatgctggaagggtccttgcccataagaagctgacagccaaggctaggggagttctgtcttctctgcatcaggtcacctctctcacctctgtcactgccccatcagactacaatgtctgcaggtctttctcccctgagtgtgagctccctgagcaaagcaggatgctgccccttccctttgtattcctggctcctggcttcagtgcctggacataagtatgggcataataagtgtcccccaaatgagacattgaggattcttcaaatgcacaggaccgtgatgtgagttaggacggagtaaggacgatgggatgtggctcaggacaatcctgaggaagctgcagctgcggcacgcagggccacactgtcatgttcatggaccctagactggctttgtagcctccatgggccccttccatacacaaatattaaaaattatatttcatgactgcattggtataaagatgaatataatccagaccagattcatgattattcatacatttttagtgtattaacttttaattctgcttttaaaataaattaaaacattctaatatgcccttaagagtatcccaggcccaggccactgagcctactgtggttcatggataagttggccctgggggcatgtgtgtgcatgcatgtgtgtgcacatgcatgatgagccgggccttgaagggtggtaagatttgggtgtgtagaccaatggagaaaggcatttggggcagtgatgatgggtgggggagggaacatggtgatgaatggagctgggtgtggggagccatgggagtgggttagggccagcctgtggaggacctgggagccaggctgagttctatgcacttggcagtcacttctgtaaagcagcagaggcagttggcatagctaaagcctttcgccttttcttgcaccctttacag

SEQ ID NO: 28 - DNA, 951 bp, Homo sapiens
gtaagtaaaaaccttctctgcatctgtttataattggaaattgacctgcaccagggaaagagagtagcccaggtgtctggggcttgttcccattagatcttccccaaggggtttttctccttggtggctggcctgtggggcccctctccaggaggcattggtgaagaaactaggggagctggttgccacagacagtgatgtactaatcttctctgggaagacagaagaaaagtccccagggaagaatactacagacttggccttagggacagctaggggtgcagattgctgccaactgcattttttctgaagttggccatatggttgcagtgaatggatttatagacagagtatttctgtgcatataagagcaattacagttgtaagttgatatggataagtgaaagttaagcacttctttctaaaaagagaatgcaattcattttcccctaatcatttcaattagtctgatgggcatttgaacttgttgtctttaaaaagtgaaatctttacctctgatctggtaagtatccaggcaatttcttgtgtgccacccaggaggtatctggggagtgggcattttctgactgaggcattggctgccatagcatcagagcagccttccaggcagtggcctggcaaggggacagaggctggtgggagcagctggctgagtgcagccagtaatggcatgtgcatggtctgtagagaatgtagaagcaataatgaagccgataaaagctggtctgcattttattattatcatgcgccggtggttctaaacaatgtcagtgataaattactcctccccatcatggaccaatggctgccactgctccagggaagtgctttttattccgtttggtgtttagggagggatggagttggctggcctttgctgaaaggcctaccagtttgttttctatttggcaaaagaagaaatgataaagt

SEQ ID NO: 29 - DNA, 122 bp, Homo sapiens
acttgaagcttcaagatttcctggtggacaatgaaaccttctctgggttcctatatcacaacctctctctcccaaagtctactgtggacaagatgctgagggctgatgtcattctccacaag

SEQ ID NO: 30 - DNA, 177 bp, Homo sapiens
gtatttttgcaaggctaccagttacatttgacaagtctgtgcaatggatcaaaatcagaagagatgattcaacttggtgaccaagaagtttctgagctttgtggcctgccaagggagaaactggctgcagcagagcgagtacttcgttccaacatggacatcctgaagccaatcctg

SEQ ID NO: 31 - DNA, 177 bp, Homo sapiens
gtatttttgcaaggctaccagttacatttgacaagtctgtgcaatggatcaaaatcagaagagatgattcaacttggtgaccaagaagtttctgagctttgtggcctaccaaaggagaaactggctgcagcagagcgagtacttcgttccaacatggacatcctgaagccaatcctg

SEQ ID NO: 32 - DNA, 604 bp, Homo sapiens
  modified_base (9): a, t, c or g
ttcattgcntgacactttactgagaccaagatagggaacttcacataccagaccttttctcccaaggcggaagagggctgttcaatttctacactagagttcggggagttttagaaatgagccagttgtcgaggatgagagcagttcctgataggctcaaccacaatgagatgtagctgttcagagaaagcattcttatctataaactggaagataatcccggtgaaacaaagcccagccccaggggcttcactaactccaggctgtgcttctcaaactttagtgagcataggaatcacctgggcatcttgtgaagctgtagatttgaattctgcaggtcggcagaggggtctcagaatccgcatttccaacaatgtctccagtaatgctgatgctgctcgtccctggaccacagattgggtagccaggttctggcaagctcatcccaaggctttgagatgacatcagacaaaatatgttctgggacatggcttttgagaggtcaagaaaataagatgtttctttctcttctcatccccaacccttgcactgcccttttctcccttcccctaccctcctttctgtccccaatccctgacgccag

SEQ ID NO: 33 - DNA, 241 bp, Homo sapiens
ctgttcagcatgagaagctggagtgacatgcgacaggaggtgatgtttctgaccaatgtgaacagctccagctcctccacccaaatctaccaggctgtgtctcgtattgtctgcgggcatcctgagggaggggggctgaagatcaagtctctcaactggtatgaggacaacaactacaaagccctctttggaggcaatggcactgaggaagatgctgaaaccttctatgacaactctacaa

SEQ ID NO: 34 - DNA, 241 bp, Homo sapiens
ctgttcagcatgagaagctggagtgacatgcgacaggaggtgatgtttctgaccaatgtgaacagctccagctcctccacccaaatctaccaggctgtgtctcgtattgtctgcgggcatcccgagggagggggactgaagatcaagtctctcaactggtatgaggacaacaactacaaagccctctttggaggcaatggcactgaggaagatgctgaaaccttctatgacaactctacaa

SEQ ID NO: 35 - DNA, 613 bp, Homo sapiens
  modified_base (5): a, t, c or g
  modified_base (509): a, t, c or g
cctantttggtatttttagaaaagacagggtttttccatgttggtcaggctggtctcgaactcccaccctcaggtggttcgcccgccttggcctcccaaagtgctgggattgcaggcatgagccactgcgcccagccccaaattttggtttttgcttgaaaactgaggtctgaattcagccttctggttgcccctcaagagtcagtttaaatgttggtcatgttagttgtcagtgaaaacaatggtgaggctggcatgagagtgtgaacctggatgggagggcttgtgcttcacgaaaacatttttccagatcagctcagtcgtgagttatccgtcattgacgttataataagctctgattatttatcaagcatcattctttatagatatctcagtttaatctgagataatcttctccacatctctccacatagatgttatgaattttacttttacagaggagccaactgaggctcagataagttacttattatatgactagtagtggnagagctggggtttcagctaagaactctctggctccaaagcccttgtaagtttctatcagtatatgaccatgcatatgagcatttgtctctcctcttcttcatag

SEQ ID NO: 36 - DNA, 331 bp, Homo sapiens
gtaagctgcccccagcccaagactccctccccagaatctccccagaactgggggcaaaaaactcaaggtagcttcagaggtgtgcgctaagtatactcacggctcttctggaattcccagagtgaaaacctcaagtctgatgcagaccagagctgggccagctccccagtcgtgggtatagaatcatagttacaagcaggcatttcttggggatggggaggactggcgcagggctgctgtgatggggtatcttttcagggaggagccaaacgctcattgtctgtgcttctcctcctttttctgcggtccctggctccccacctgactccag

SEQ ID NO: 37 - DNA, 332 bp, Homo sapiens
gtaagctgcccccagcccaagactccctccccagaatctccccagaactgggggcaaaaaactcaaggtagcttcagaggtgtgcgctaagtatactcacggctcttctggaattcccagagtgaaaacctcaagtctgatgcagaccagagctgggccagctccccagtcgtgggtatagaatcatagttacaagcaggcatttcttggggatggggaggactggcacagggctgctgtgatggggtatcttttcagggaggagccaaagcgctcattgtctgtgcttctcctcctttttctgcggtccctggctccccacctgactccag

SEQ ID NO: 38 - DNA, 328 bp, Homo sapiens
gtaagctgcccccagcccaagactccctccccagaatctccccagaactgggggcaaaaaactcaaggtagcttcagaggtgtgcgctaagtatactcacggctcttctggaattcccagagtgaaaacctcaagtctgatgcagaccagagctgggccagctccccagtcgtgggtatagaatcatagttacaagcaggcatttcttggggatggggaggactggcacagggctgctgtgatggggtatcttttcagggaggagccaaacgctcattgtctgtgcttctcctttttctgcggtccctggctccccacctgactccag

SEQ ID NO: 39 - DNA, 331 bp, Homo sapiens
gtaagctgcccccagcccaagactccctccccagaatctccccagaactgggggcaaaaaactcaaggtagcttcagaggtgtgcgctaagtatactcacggctcttctggaattcccagagtgaaaacctcaagtctgatgcagaccagagctgggccagctccccagtcgtgggtatagaatcatagttacaagcaggcatttcttggggatggggaggactggcacagggctgctgtgatggggtatcttttcagggaggagccaaacgctcattgtctgtgcttctcctcctttttctgcggtccctggctccctacctgactccag

SEQ ID NO: 40 - DNA, 206 bp, Homo sapiens
tgtgtcaacctgaacaagctagaacccatagcaacagaagtctggctcatcaacaagtccatggagctgctggatgagaggaagttctgggctggtattgtgttcactggaattactccaggcagtattgagctgccccatcatgtcaagtacaagatccgaatggacattgacaatgtggagaggacaaataaaatcaaggatgg

SEQ ID NO: 41 - DNA, 520 bp, Homo sapiens
gtaagtggaatcccatcacaccagcctggtcttggggaggtccagagcacctattatattaggacaagaggtactttattttaactaaaaatttggtagaaatttcaacaacaacaaaaaaactcaacttggtgtcatgattttggtgaaattggtacatgacttgctggaaggtttttcataggtcataaaataacagtatcttttgatttagcatttctactcaagggaattaattccaggaattttggtggcaggcacctgtaatcccagctactcgggaggctgaggcaggagaattgcttgaacccaggaggcagaggttgcagtgagctaagatcgcatcattgcactcccgcctgggcaataagagtgaaactccatctcaaaaaaaaaaaaagatacaaaaatagaaaaaggggcttggtaagggtagtagggttttgggcaatttttttttttttttttttttattgtatggttctaaaggagtggttgattacctgtggtttggttttag

SEQ ID NO: 42 - DNA, 1786 bp, Homo sapiens
gtaagttacctgcaagccactgtatttaaccagtttatactgtgccagatgggggtgtatatatgtgtgtgcatgtgcatgcatgtgtgaatgatctggaaataagatgccagatgtaagttgtcaacagttgcagccacatgacagacatagatatatgtgcacacactagtaaacctctttccttctcatccatggttgccacttttatctttttatttttatttttttttttgagatggagtctcgctctgacgcccaggctggagtgcagtggctcgatctcggctcactgcaacctttgcctcccgggttcaagctattctcctgcctcagcctccacagtagctgggactacaggctcatgctgccacgcccggctgactttttgtattttagtagagacgaggtttcaccatgttacccaggctagacttcaactcctgagctcaggcaatccaccctccttggcctcccaaagtgctgggattacaggtgtgagccactgcacccagcccaccactttaattttttacactctacccttttggtcaaaatttgctcaatctgcaagcttaaaatgtgtcatgacaaacacatgcaagcacatactcacacatagatgcagaaacagcgtctaaacttataaaagcacagtttatgtaaatgtgtgcacttcttctccctaggtggtaaaccacatttcaaaacaacccaaataaaactgaacaaagcttcttcctcttagactttttagaaaatctttcagtgctgagtcactaagctgccaagttctcattgtgggaactatgcctttggatgtaatgatttcttctaagacaatgggcggaggtgtagttattgcagacatctgaaatatgtaatgtttcttccagattctggaaattctcttattctctgtggttggtggtggtggtgggatgtgtgtgtgtgtgtgtgtgtgtgtgtgtgtgtgtgtgtagggatcaggatgcgggaggagctgggttctgcttgtattggttctctgttttgcattgaatagtgtgtttccttgtatggctatctatagcttttcaaggtcaccagaaattatcctgtttttcaccttctaaacaattagctggaatttttcaaaggaagacttttacaaagacccctaagctaaggtttactctagaaaggatgtcttaagacagggcacaggagttcagaggcattaagagctggtgcctgttgtcatgtagtgagtatgtgcctacatggtaaagctttgacgtgaacctcaagttcagggtccaaaatctgtgtgcctttttactttgcacatctgcattttctattctagcttggaatctgaaacattgacaagagctgcctgaaatgtatgtctgtggtgtgattagagttacgataagcaagtcaatagtgagatgaccttggagatgttgaacttttgtgagagaatgagttgtttttttgttttggtttttagtactttaacataatctacctttagtttaagtatcgctcacagttacctagttactgaagcaagcccccaaagaaatttggtttggcaacactttgttagcctcgtttttctctctacattgcattgctcgtgaagcattggatcatacgtacatttcagagtctagagggcctgtccttctgtggcccagatgtggtgctccctctagcatgcaggctcagaggccttggcccatcaccctggctcacgtgtgtctttctttctccccttgtccttccttggggcctccag

SEQ ID NO: 43 - DNA, 1786 bp, Homo sapiens
gtaagttacctgcaagccactgtttttaaccagtttatactgtgccagatgggggtgtatatatgtgtgtgcatgtgcatgcatgtgtgaatgatctggaaataagatgccagatgtaagttgtcaacagttgcagccacatgacagacatagatatatgtgcacacactagtaaacctctttccttctcatccatggttgccacttttatctttttatttttatttttttttttgagatggagtctcgctctgacgcccaggctggagtgcagtggctcgatctcggctcactgcaacctttgcctcccgggttcaagctattctcctgcctcagcctccacagtagctgggactacaggctcatgctgccacgcccggctgactttttgtattttagtagagacgaggtttcaccatgttacccaggctagacttcaactcctgagctcaggcaatccaccctccttggcctcccaaagtgctgggattacaggtgtgagccactgcacccagcccaccactttaattttttacactctacccttttggtcaaaatttgctcaatctgcaagcttaaaatgtgtcatgacaaacacatgcaagcacatactcacacatagatgcagaaacagcgtctaaacttataaaagcacagtttatgtaaatgtgtgcacttcttctccctaggtggtaaaccacatttcaaaacaacccaaataaaactgaacaaagcttcttcctcttagactttttagaaaatctttcagtgctgagtcactaagctgccaagttctcattgtgggaactatgcctttggatgtaatgatttcttctaagacaatgggcggaggtgtagttattgcagacatctgaaatatgtaatgtttcttccagattctggaaattctcttattctctgtggttggtggtggtggtgggatgtgtgtgtgtgtgtgtgtgtgtgtgtgtgtgtgtgtgtagggatcaggatgcgggaggagctgggttctgcttgtattggttctctgttttgcattgaatagtgtgtttccttgtatggctatctatagcttttcaaggtcaccagaaattatcctgtttttcaccttctaaacaattagctggaatttttcaaaggaagacttttacaaagacccctaagctaaggtttactctagaaaggatgtcttaagacagggcacaggagttcagaggcattaagagctggtgcctgttgtcatgtagtgagtatgtgcctacatggtaaagctttgacgtgaacctcaagttcagggtccaaaatctgtgtgcctttttactttgcacatctgcattttctattctagcttggaatctgaaacattgacaagagctgcctgaaatgtatgtctgtggtgtgattagagttacgataagcaagtcaatagtgagatgaccttggagatgttgaacttttgtgagagaatgagttgtttttttgttttggtttttagtactttaacataatctacctttagtttaagtatcgctcacagttacctagttactgaagcaagcccccaaagaaatttggtttggcaacactttgttagcctcgtttttctctctacattgcattgctcgtgaagcattggatcatacgtacatttcagagtctagagggcctgtccttctgtggcccagatgtggtgctccctctagcatgcaggctcagaggccttggcctatcaccctggctcacgtgtgtctttctttctccccttgtccttccttggggcctccag

SEQ ID NO: 44 - DNA, 223 bp, Homo sapiens
ctttctgcgggtgatgagccggtcaatgcccctcttcatgacgctggcctggatttactcagtggctgtgatcatcaagggcatcgtgtatgagaaggaggcacggctgaaagagaccatgcggatcatgggcctggacaacagcatactctggtttagctggttcattagtagcctcattcctcttcttgtgagcgctggcctgctagtggtcatcctgaag

SEQ ID NO: 45 - DNA, 1745 bp, Homo sapiens
  modified_base (545): a, t, c or g
  modified_base (572): a, t, c or g
gtaaggcagcctcactcgctcttccctgccaggaaactccgaaatagctcaacacgggctaagggaggagaagaagaaaagaaatccaagcctctggtagagaaggggtcatacctgtcatttcctgcaatttcatccatttatagttggggaaagtgaggcccagagaggggcagtgacttgcccaaggtcaacccagccgggtagcagctaagtaggatgagagtgcagggttcatgctttccagataaccacatgctcaactgtgccatgctgtctcattggtagtggttcatggcagcatctgaaagctatttattttcttagatatattgggtggcgattcttcctaagtttctaagaacaataatcagaaggatatatattgttgcaggttagactgtctggaagcagaggctgaaatagagtttgatgtatgggtatttatgagggctcaatacctatgaagagatatggaagatgcaggattgggcagagggaggagttgaactgtgatatagggccaaccccgtggggcactctanagaatatgcagcttgttggagttgttnttcatcgagctgaaacatccagccctttgtgctcccccaaggcctccctcctgacaccacctacctcagccctctcaatcaatcactggatgtgggctgccctgggaaggtcgtgccccagggcctacatggctctctgctgctgtgacaaacccagagttgctgatgcctgaggccgtctactgacagctgggcaacaaggcttccctgaatggggactctgggcagtgcagttttgtgtctgaaccatacattaatatatttatatccgaattttctttctctgcaagcatttcatataaagacacatcaggtaaaaataaatgtttttgaagcaaaaggagtacaaagagataagaactaactaatttaatactagttaccatctgttacaaatagttcctactgattgccaaggactgtttaaacacatcacatgggcttcttcttctatcctcactaacccttttaacagacaaggaaatgaggctcaggaaggtcaaggactttattgaggttccacagtaggatacagttcttgctaaaagcaacccctccctcatgctctgttatctaactgcaaggggaaggtcagtggcagaggtagtggtcccatggttggtgcataagagctgctctgagacaactgcatgctggtgggtcctgcagacatgtacccatcagccggagataggctcaaaatatccacaagagtttggatgattgtgggaatgcagaatccatggtgatcaagagggaaagtcaagttgcctggccattttccttggcttttagacagaaaagttacgtgggatattatctcccacagctcttctgtggtgccaccagtcatagtccttatataaggagaaaccagttgaaattacctattgaagaaacaaagagcaaactcgcccactgaaatgcgtagaaagccctggactctgttgtattcataactctgccattatttttctgcgtagttttgggtaagtcacttatcttctttaggatggtaatgatcagttgcctcatcagaaagatgaacagcattacgcctctgcattgtctctaacatgagtaggaataaaccctgtcttttttctgtagatcatacaagtgagtgcttgggattgttgaggcagcacatttgatgtgtctcttccttcccag

SEQ ID NO: 46 - DNA, 1745 bp, Homo sapiens
  modified_base (545): a, t, c or g
  modified_base (572): a, t, c or g
gtaaggcagcctcactcgctcttccctgccaggaaactccgaaatagctcaacacgggctaagggaggagaagaagaaaaaaaatccaagcctctggtagagaaggggtcatacatgtcatttcctgcaatttcatccatttatagttggggaaagtgaggcccagagaggggcagtgacttgcccaaggtcaacccagccgggtagcagctaagtaggatgagagtgcagggttcatgctttccagataaccacatgctcaactgtgccatgctgtctcattggtagtggttcatggcagcatctgaaagctatttattttcttagatatattgggtggcgattcttcctaagtttctaagaacaataatcagaaggatatatattgttgcaggttagactgtctggaagcagaggctgaaatagagtttgatgtatgggtatttatgagggctcaatacctatgaagagatatggaagatgcaggattgggcagagggaggagttgaactgtgatatagggccaaccccgtggggcactctanagaatatgcagcttgttggagttgttnttcatcgagctgaaacatccagccctttgtgctcccccaaggcctccctcctgacaccacctacctcagccctctcaatcaatcactggatgtgggctgccctgggaaggtcgtgccccagggcctacatggctctctgctgctgtgacaaacccagagttgctgatgcctgaggccgtctactgacagctgggcaacaaggcttccctgaatggggactctgggcagtgcagttttgtgtctgaaccatacattaatatatttatatccgaattttctttctctgcaagcatttcatataaagacacatcaggtaaaaataaatgtttttgaagcaaaaggagtacaaagagataagaactaactaatttaatactagttaccatctgttacaaatagttcctactgattgccaaggactgtttaaacacatcacatgggcttcttcttctatcctcactaacccttttaacagacaaggaaatgaggctcaggaaggtcaaggactttattgaggttccacagtaggatacagttcttgctaaaagcaacccctccctcatgctctgttatctaactgcaaggggaaggtcagtggcagaggtagtggtcccatggttggtgcataagagctgctctgagacaactgcatgctggtgggtcctgcagacatgtacccatcagccggagataggctcaaaatatccacaagagtttggatgattgtgggaatgcagaatccatggtgatcaagagggaaagtcaagttgcctggccattttccttggcttttagacagaaaagttacgtgggatattatctcccacagctcttctgtggtgccaccagtcatagtccttatataaggagaaaccagttgaaattacctattgaagaaacaaagagcaaactcgcccactgaaatgcgtagaaagccctggactctgttgtattcataactctgccattatttttctgcgtagttttgggtaagtcacttatcttctttaggatggtaatgatcagttgcctcatcagaaagatgaacagcattacgcctctgcattgtctctaacatgagtaggaataaaccctgtcttttttctgtagatcatacaagtgagtgcttgggattgttgaggcagcacatttgatgtgtctcttccttcccag

SEQ ID NO: 47 - DNA, 222 bp, Homo sapiens
ttaggaaacctgctgccctacagtgatcccagcgtggtgtttgtcttcctgtccgtgtttgctgtggtgacaatcctgcagtgcttcctgattagcacactcttctccagagccaacctggcagcagcctgtgggggcatcatctacttcacgctgtacctgccctacgtcctgtgtgtggcatggcaggactacatgggcttcacactcaagatcttcgct

SEQ ID NO: 48 - DNA, 205 bp, Homo sapiens
agcctgctgtctcctgtggcttttgggtttggctgtgagtactttgccctttttgaggagcagggcattggagtgcagtgggacaacctgtttgagagtcctgtggaggaagatggcttcaatctcaccacttcgatctccatgatgctgtttgacaccttcctctatggggtgatgacctggtacattgaggctgtctttccag

SEQ ID NO: 49 - DNA, 114 bp, Homo sapiens
gccagtacggaattcccaggccctggcattttccttgcaccaagtcctactggtttggcgaggaaagtgatgagaagagccaccctggttccaaccagaagagaatatcagaaa

SEQ ID NO: 50 - DNA, 114 bp, Homo sapiens
gccagtacggaattcccaggccctggtattttccttgcaccaagtcctactggtttggcgaggaaagtgatgagaagagccaccctggttccaaccagaagagaatgtcagaaa

SEQ ID NO: 51 - DNA, 1180 bp, Homo sapiens
gtaagtgctgttgacctcctgctctttctttaacctagtgctgctgcctctgctaactgctgggggcaagcgatgtctcctgcctttctaaaagactgtgaaaccactccaggggcagagaaatcacatgcagtgtccctttccaaatcctcccatgccatttatgtccaatgctgttgacctattgggagttcacggtctcgatccctgagggacattttctttgttgtcttggcttctagaagagtatcttttacttgccccctcccaaacacacatttcatggtctcctaacaagctagaagaaagaggtaaagacaagcgtgattgtggaaccatagcctcgctgcctgcctgtgacatggtgacctgtgtatcagcctgtgtgggctgagaccaagtggctaccacagagctcagcctatgcttcataatgtaatcattacccagatccctaatcctctcttggctcttaactgcagacagagatgtccacagctcatcaaaggctctgccttctgggttctttgtgcttagagtggcttcctaaatatttaataggtcccttttctgccagtctcttctgtgcccatcccctgattgcccttggtaaaagtatgatgccccttagtgtagcacgcttgcctgctgttcctaatcatcttctcctacctcctctttacacctagctcctgtttcagtcacctagaaatgctcacagtcgctggaatatgtcatgttcttccacacctccatgcctttgtaggtactgtttgctctcacaggagaactttctctctaacttgcctatcttctcaactcctcctttctctccaagatctagttccggatcccctcccctgagcatccctccttggttctcaggtagtcagtcactctctgccctgaacttccatggcacgtgaaagaaaatctttttattttaaaacaattacagactcacaagaagtaatacaaattacatgagggggttcccttaaacctttcatccagtttccccaatggtagcagcatgtgtaactgtagaatagtatcaaaaccatgaaattgacataggtacaattcacaaaccttcttcagatttcactagctttatgtgcgctcatttgtgtgtgtgtgtgcgtatttagttctatgcaattttatcatgtgtgaattc

SEQ ID NO: 52 - DNA, 386 bp, Homo sapiens
  modified_base (43): a, t, c or g
  modified_base (94): a, t, c or g
  modified_base (145): a, t, c or g
  modified_base (196): a, t, c or g
  modified_base (247): a, t, c or g
  modified_base (298): a, t, c or g
ttagatctatccaagttgtgtgtgtcaacagttcattcctctntcactgctgagtagtgttccctgggaggggtgtatcacagttccatggcantttttagatgtattttttaaacagctttcagcatcctctattttaattgtntcatcaagtcctttttcccaatagactctgaatgctcctttatcatcgtanttcccatcaccaacatcagtacccaaataggccctaaataaacatttatangcctcctgcctgcctgagaaaccagggtggacatggagagaaggcacttcntgaaagttcaagcgcagtgcgctgtgtccttacactccactcctcagtgctttctgtgggttcatttctgtcttctctcctgtcacag

SEQ ID NO: 53 - DNA, 172 bp, Homo sapiens
tcttcatggaggaggaacccacccacttgaagctgggcgtgtccattcagaacctggtaaaagtctaccgagatgggatgaaggtggctgtcgatggcctggcactgaatttttatgagggccagatcacctccttcctgggccacaatggagcggggaagacgaccaccat

SEQ ID NO: 54 - DNA, 132 bp, Homo sapiens
gtcaatcctgaccgggttgttccccccgacctcgggcactgcctacatcctgggaaaagacattcgctctgagatgagcaccatccggcagaacctgggggtctgtccccagcataacgtgctgtttgacat

SEQ ID NO: 55 - DNA, 486 bp, Homo sapiens
gtgagtaccagcagcacattaagaataggccttttctggatgtgtgtgtgtcatgccatcatgggaggagtgggacttaagcattttactttgctgtgtttttgttttttctttttttcttttttatttttttgagatggagtctcgctctgtagccaggctggactgtagtggcgcgatctcggctcactgcaaccttggcctcccaggttcaagcgattctcctgcctcagcctcccgagtagctgggactctaggcacacaccaccatgcccagctaatttttgtgtttttagtagagacggggtttcaccatgttggccaggatggtctcaatgtcttgacctcgtgatccgcccacctcggtctcccaaagtgctgggaacacaggcatgagccactgtgtctggccacattttactttctttgaatatggcaggctcacctccgtgaacaccttgagacctagttgttctttgattttag

SEQ ID NO: 56 - DNA, 283 bp, Homo sapiens
gaaattgaaagttgtaactgcctggtgcatggtggccaggcctgctggaaacaggttggaagcgatctgtcacctttcactttgatttcctgagcagctcatgtggttgctcactgttgttctaccttgaatcttgaagattatttttcagaaattgataaagttattttaaaaagcacggggagagaaaaatatgcccattctcatctgttctgggccaggggacactgtattctggggtatccagtagggcccagagcttgacctgcctccttgtccccag

SEQ ID NO: 57 - DNA, 221 bp, Homo sapiens
gccgcaccattattctctctacacaccacatggatgaagcggacgtcctgggggacaggattgccatcatctcccatgggaagctgtgctgtgtgggctcctccctgtttctgaagaaccagttgggaacaggctactacctgaccttggtcaagaaagatgtggaatcctccctcagttcctgcagaaacagtagtagcactgtgtcatacctgaaaaag

SEQ ID NO: 58 - DNA, 1258 bp, Homo sapiens
gtgagctgcagtcttggtgctgggctggtgttgggtctgggcagccaggacttgctggctgtgaatgatttctccatctccaccccttttgccatgttgaaaccaccatctccctgctctgttgcccctttgaaatcatatcatacttaaggcatggaaagctaaggggccctctgctcccattgtgctagttctgttgaatcccgttttccttttcctatgaggcacagagagtgatggagaaggtccttagaggacattattatgtcaaagaaaagagacttgtcaagaggtaagagccttggctacaaatgacctggtgttcctgctcattacttttcaatctcattgaccttaacttttaaactataaaacagccaatatttattaggcactgatttcatgccagagacactctgggcatgaaagaaagtaatgataatagttaattttatatagcgttgttaccatttacaaccttttttttttttttaacctctatcatctcaattaaagtgcagagagaccctgggaagaaggtaactatatttattatcccagatgagggaagtgaggcttgtagggaattggtagctgattcaaggtcacccagcaggtaaataacagtggtgggaccagacccaattaccaggtatgttttcctctgtaccgcagtacatgcctgagatttatttgtgtgttgaagccagtggtacctaatgtatttacatcccaacctgaaactcctatccacttatttaccttttaatgagcctcttaactcaagtgcagtctgaggaccagcagcatcaggatcacttgggaacttgttagaaattcagcaacctgggcccagctcagacctaccgaatcagaatctgtgcattttaacaaggttcttgagtggttgaacacacattaaagcatgagaagcattgaactagacatgtagccaggtaaaggccttgcctgagatggttggcaaaggcctcattgcagcattcattggcaggccacagttcttttggcagctctgcttcctgacctttcaccctcaggaagcgaggctgttcacacggcacacacatgccagacagggtcctctgaagccacggctgccagtgcatgtgtcccagggaaagctttttcctttagttctcacacaacagagcttcttggaagccctccccggcgaaggtgctggtggctctgccttgctccgtccctgacccgttctcacctccttctttgccatcag

SEQ ID NO: 59 - DNA, 73 bp, Homo sapiens
gaggacagtgtttctcagagcagttctgatgctggcctgggcagcgaccatgacagtgacacgctgaccatcg

SEQ ID NO: 60 - DNA, 986 bp, Homo sapiens
  modified_base (502): a, t, c or g
  modified_base (510): a, t, c or g
  modified_base (512): a, t, c or g
gtaaggactctggggtttcttattcaggtggtgcctgagcttcccccagctgggcagagtggaggcagaggaggagaggtgcagaggctggtggcgctgactcaaggtttgctgctgggctggggctgggtggctgcgggtgtgggagtagcttggtggcgggttggcctaatgcttgctggggtgcctggggctcggtttgggagctagcagggcagtgtcccagagagctgagatgattggggtttggggaatcccttaggggagtggacactgaataccagggatgaggagctgagggccaagccaggagggtgggatttgagcttagtacataagaagagtgagagcccaggagatgaggaacagccttccagatttttcttgggtagcgtgtgtaggaggccagtgtcaccagtagcatatgtggaacagaagtcttgacccttgctatctctgcctagtcctaatggctggcttttcccaggaaggcttctgcttncatggacngntagattaaccctttatttaggtaaatgagggaacctactttataagcataggaaagggtgaagaatcttttaagattcctttactcaagttttcttttgaagaatcccagagcttaggcaatagacaccagactttgagcctcagttatccattcacccatccacccacccacccacccatccttccatcctcccatcctcccattcacccatccacccatccagctgtccacccattctacactgagtacctataatgtgcctggctttggtgatacaaaggtgaataagacatagtcctttcctttgcccccaaccctcagaccagagatgaacatgtggaatgacctaaacacctggaacaggtgtggtgtatgagcggcaggcctctgatgagagggtgggggatggccagccctcactccgaagcccctctgagttgattgagccatctttgcattctggtccctgcag

SEQ ID NO: 61 - DNA, 986 bp, Homo sapiens
  modified_base (502): a, t, c or g
  modified_base (510): a, t, c or g
  modified_base (512): a, t, c or g
gtaaggactctggggtttcttattcaggtggtgcctgagcttcccccagctgggcagagtggaggcagaggaggagaggtgcagaggctggtggcgctgactcaaggtttgctgctgggctggggctgggtggctgcgggtgtgggagcagcttggtggcgggttggcctaatgcttgctggggtgcctggggctcggtttgggagctagcagggcagtgtcccagagagctgagatgattggggtttggggaatcccttaggggagtggacactgaataccagggatgaggagctgagggccaagccaggagggtgggatttgagcttagtacataagaagagtgagagcccaggagatgaggaacagccttccagatttttcttgggtagcgtgtgtaggaggccagtgtcaccagtagcatatgtggaacagaagtcttgacccttgctatctctgcctagtcctaatggctggcttttcccaggaaggcttctgcttncatggacngntagattaaccctttatttaggtaaatgagggaacctactttataagcataggaaagggtgaagaatcttttaagattcctttactcaagttttcttttgaagaatcccagagcttaggcaatagacaccagactttgagcctcagttatccattcacccatccacccacccacccacccatccttccatcctcccatcctcccattcacccatccacccatccagctgtccacccattctacactgagtacctataatgtgcctggctttggtgatacaaaggtgaataagacatagtcctttcctttgcccccaaccctcagaccagagatgaacatgtggaatgacctaaacacctggaacaggtgtggtgtatgagcggcaggcctctgatgagagggtgggggatggccagccctcactctgaagcccctctgagttgattgagccatctttgcattctggtccctgcag

SEQ ID NO: 62 - DNA, 203 bp, Homo sapiens
atgtctctgctatctccaacctcatcaggaagcatgtgtctgaagcccggctggtggaagacatagggcatgagctgacctatgtgctgccatatgaggctgctaaggagggagcctttgtggaactctttcatgagattgatgaccggctctcagacctgggcatttctagttatggcatctcagagacgaccctggaagaa

SEQ ID NO: 63 - DNA, 203 bp, Homo sapiens
atgtctctgctatctccaacctcatcaggaagcatgtgtctgaagcccggctggtggaagacatagggcatgagctgacctatgtgctgccatatgaagctgctaaggagggagcctttgtggaactctttcatgagattgatgaccgactctcagacctgggcatttctagttatggcatctcagagacgaccctggaagaa

SEQ ID NO: 64 - DNA, 149 bp, Homo sapiens
aatccagagagacagacttgctcagtgggatggatggcaaaggatcctaccaggtgaaaggctggaaacttacacagcaacagtttgtggcccttttgtggaagagactgctaattgccagacggagtcggaaaggattttttgctcag

SEQ ID NO: 65 - DNA, 190 bp, Homo sapiens
agacacaccctgccaggcaggggaggaagagtggaccactgccccagttccccagaccatcatggacctcttccagaatgggaactggacaatgcagaacccttcacctgcatgccagtgtagcagcgacaaaatcaagaagatgctgcctgtgtgtcccccaggggcaggggggctgcctcctccacaa

SEQ ID NO: 66 - DNA, 190 bp, Homo sapiens
agacacgccctgccaggcaggggaggaagagtggaccactgccccagttccccagaccatcatggacctcttccagaatgggaactggacaatgcagaacccttcacctgcatgccagtgtagcagcgacaaaatcaagaagatgctgcctgtgtgtcccccaggtgcaggggggctgcctcctccacaa

SEQ ID NO: 67 - DNA, 1309 bp, Homo sapiens
gtgactttttactaaacttggcccctgccttattattactaattagaggaattaaagacctacaaataacagactgaaacagtgggggaaatgccagattatggcctgattctgtctattggaagtttaggatattatcccaaactagaaaagatgacgagagggactgtgaacattcagttgtcagcttcaaggctgaggcagcctggtctagaatgaaaatagaaatggattcaacgtcaaattttgccacttagtagcaacttgaccaggtaactggttatccttttaaagccttagtttatctaaattgtgatattaatgttgctcttataagtttgtcatgaggactaaattaaatggtgtacatagagtgccttgggtactctctgatgggggactccatgataatttgtggtctcatggagggagctctgggaaggtttaggagcctgccttggctctgcagccttgggagagccttctagcttcccaggacatggcagcctagtgttgaatgcttggctcagcaaatgtttgttctcgtttccttcccatcaacttggtcagttggggtctttcagttaggagtatctcagtgactttaaatggcatgggcatgctggagtgatagtgaccatgagtttctaagaaagaagcataatttctccatatgtcatccacaattgaaatattattgttaattgaaaaagcttctaggccaggcacggtggctcatgcctgtaatcccagcactttaggaggccaaggcgggtggatcacttgaggtcaggagtttgagaccagcctggccaacatggggaaaccctgtctctactaaaaatacaaaataagctgggcgtggtggtgcgtgcctgtaatcccagctacttgggaggctgaggcaggagaattgcttgaatctgggaggcggaggttgcagtgagctgagttcatgccattgcattccagcctgggcaacaagagcgaaaccatctcccaaaagaaaaaaaaaagaaagaaaaagcttctagtttggttacatcttggtctataaggtggtttgtaaattggtttaacccaaggcctggttctcatataagtaatagggtatttatgatggagagaaggctggaagaggcctgaacacaggcttcttttctctagcacaaccctacaaggccagctgattctagggttatttctgtccgttccttatatcctcaggtggatatttactccttttgcatcattaggaataggctcagtgctttctttgaactgattttttgtttctttgtctctgcag

SEQ ID NO: 68 - DNA, 1122 bp, Homo sapiens
gtaagttgctgtctttctggcacgtttagctcagggggaggatggtgttgtaggtgtcttggattgaagaaagccttggggattgtttgtcactcacacacttgtgggtgccatctcactgtgaggaggacagaagccctgtgaacatgtggagcacacaggggcacagacagatttagattaggcctgctttatagagtttctgcctagagcatcatggctcagtgcccagcagcccctccagaggcctctgaaatatttgatatactgatttccttgaggagaatcagaaatctcctgcaggtgtctagggatttcaagtaagtagtgttgtgaggggaatacctacttgtactttccccccaaaccagattcccgaggcttcttaaggactcaaggacaatttctaggcatttagcacgggactaaaaaggtcttagaggaaataagaagcgccaaaaccatctctttgcactgtatttcaacccatttgtccttctgggttttgaaggaacaggtgggactggggacagaagagttcttgaagccagtttgtccatcatggaaaatgagataggtgatgtggctacgtcagggggcccgaaggctccttgttactgatttccgtcttttctctctgccttttccccaagggccaggacccctggatctctgggcagagcagacgcaggcccctataatagccctcatgctagaaaggagccggagcctgtgtataaggccagcgcagcctactctggacagtgcagggttcccactctcccaactccccatctgcttgcctccagacccacattcacacacgagccactgggttggaggagcatctgtgagatgaaacaccattctttcctcaatgtctcagctatctaactgtgtgtgtaatcaggccaggtcctccctgctgggcagaaaccatgggagttaagagattgccaacatttattagaggaagctgatgtgtaacttctgaggcaaaatttagccctcctttgaacaggaatttgactcagtgaaccttgtacacactcgcactgagtctgctgctgatgatactgtgcaccccactgtctgggttttaatgtcaggctgttcttttag

SEQ ID NO: 69 - DNA, 1124 bp, Homo sapiens
gtaagttgctgtctttctggcacgtttagctcagggggaggatggtgttgtaggtgtcttggattgaagaaagccttggggattgtttgtcactcacacacttgtgggtgccatctcactgtgaggaggacagaagccctgtgaacatgtggagcacacaggggcacagacagatttagattaggcctgctttatagagtttctgcctagagcatcatggctcagtgcccagcagcccctccagaggcctctgaaatatttgatatactgatttccttgaggagaatcagaaatctcctgcaggtgtctagggatttcaagtaagtagtgttgtgaggggaatacctacttgtactttccccccaaaccagattcccgaggcttcttaaggactcaaggacaatttctaggcatttagcacgggactaaaaaggtcttagaggaaataagaagcgccaaaaccatctctttgcactgtatttcaacccatttgtccttctgggttttgaaggaacaggtgggactggggacagaagagttcttgaagccagtttgtccatcatggaaaatgagataggtgatgtggctacgtcagggggcccgaaggctccttgttactgatttccgtcttttctctctgccttttccccaagggccaggacccctggatctctgggcagagcagacgcaggcccctataatagccctcatgctagaaaggagccggagcctgtgtataaggccagcgcagcctactctggacagtgcagggttcccactctcccaactccccatctgcttgcctccagacccacattcacacacgagccactgggttggaggagcatctgtgagatgaaacaccattctttcctcaatgtctcagctatctaactgtgtgtgtaatcaggccaggtcctccctgctgggcagaaaccatgggagttaagagattgccaacatttattagaggaagctgacgtgtaacttctctgaggcaaaatttagccctcctttgaacaggaatttgactcagtgaaccttgtacacactcgcactgagtctgctgctgatgatactgtgcaccccactgtctgggttttaatgtcaggctgttcttttag

SEQ ID NO: 70 - DNA, 1122 bp, Homo sapiens
gtaagttgctgtctttctggcacgtttagctcagggggaggatggtgttgtaggtgtcttggattgaagaaagccttggggattgtttgtcactcacacacttgtgggtgccatctcactgtgaggaggacagaagccctgtgaacatgtggagcacacaggggcacagacagatttagattaggcctgctttatagagtttctgcctagagcatcatggctcagtgcccagcagcccctccagaggcctctgaaatatttgatatactgatttccttgaggagaatcagaaatctcctgcaggtgtctagggatttcaagtaagtagtgttgtgaggggaatacctacttgtactttccccccaaaccagattcccgaggcttcttaaggactcaaggacaatttctaggcatttagcacgggactaaaaaggtcttagaggaaataagaagcgccaaaaccatctctttgcactgtatttcaacccatttgtccttctgggttttgaaggaacaggtgggactggggacagaagagttcttgaagccagtttgtccatcatggaaaatgagataggtgatgtggctacgtcagggggcccgaaggctccttgttactgatttccgtcttttctctctgccttttccccaagggccaggacccctggatctctgggcagagcagacgcaggcccctataatagccctcatgctagaaaggagccggagcctgtgtataaggccagcgcagcctactctggacagtgcagggttcccactctcccaactccccatctgcttgcctccagacccacattcacacacgagccactgggttggaggagcatctgtgagatgaaacaccattctttcctcaatgtctcagctatctaactgtgtgtgtaatcaggccaggtcctccctgctgggcagaaaccatgggagttaagagattgccaacatttattagaggaagctgacgtgtaacttctgaggcaaaatttagccctcctttgaacaggaatttgactcagtgaaccttgtacacactcgcactgagtctgctgctgatgatactgtgcaccccactgtctggcttttaatgtcaggctgttcttttag

SEQ ID NO: 71 - DNA, 1473 bp, Homo sapiens
gtaaaatatctatcgtaagatgtatcagaaaaatgggcatgtagctgctgggatataggagtagttggcaggttaaacggatcacctggcagctcattgttctgaatatgttggcatacagagccgtctttggcatttagcgatttgagccagacaaaactgaattacttagttgtacgtttaaaagtgtaggtcaaaaacaaatccagaggccaggagctgtggctcatgcctgtaatcctagcactttgggaggccgaagcgggtggatcacttgaggtcaggagttcgagaccagcctggcctacatgacaaaaccccgtatctactaaaaatacaaaaaaattagctgggcttggtggcacacacctgtaatcccagctacttgggaggctgaggcaggagaattgcttgaaccctgtaggaagaggttgtagtgagccaagatcgcaccgttgcactccagcctgggcaacaagagcaaaactccatctcaaaaaacaaattaaatccagagatttaaaagctctcagaggctgggcgcggtggcttacacctgttatcccagcattttgggatgccgaggcgggcaaagcacaaggtcaggagtttgagaccagcctggccaacatagtgaaaccctgtctctgctaaaaacatagaaaaattagccgggcatggtggcgtgcgcctgtaatcccagctactcgggaggctgaggtgagagaattacttgaacccgggaggcggaggttgcagtgagcccagattgcaccactgcactccagcctgggcgacagagcaagactccatctcaaaaaaagctctcagaacaaccaggtttacaaatttggtcagttggtaaataaactgggtttcaaacatactttgctgaaacaatcactgactaaataggaaatgaatcttttttttttttttttaagctggcaagctggtctgtaggacctgataagtactcacttcatttctctgtgtctcaggtttcccatttttaggtgagaattaaggggctctgataaaacagaccctaggattgtggacagcagtgatagtcctagagtccacaagtctgcttttgagtgatgggcccatgtatctggcacatctgcaggcagagcgtggttctggctcttcagatgatgccggtggagcactttgaggagtcctcaccccaccgtgataaccagacattaaaatcttggggctttgcatcccaggatttctctgtgattccttctagacttgtggcatcatggcagcatcactgctgtagatttctagtcacttggttctcaggagccgtttatttaatggcttcacatttaatttcagtgaacaaggtagtggcattgctcttcacagggccgtcctgttgtcctcaggttccagattgactgttgccccttatctatgtgaacagtcacaactgaggcaggtttctgttgtttacag

SEQ ID NO: 72 - DNA, 75 bp, Homo sapiens
gacagttctgcagatcgatttctcaacagcttgggaagatttatgacaggactggacaccagaaataatgtcaag

SEQ ID NO: 73 - DNA, 178 bp, Homo sapiens
gatgaccacatcagtggatgtccttgtgtccatctgtgtcatctttgcaatgtccttcgtcccagccagctttgtcatattcctgatccaggagcgggtcagcaaagcaaaacacctgcagttcatcagtggagtgaagcctgtcatctactggctctctaattttgtctgggatatg

SEQ ID NO: 74 - DNA, 498 bp, Homo sapiens
gtaaggacacaggcctgctgtatctttctgatgtctgtcagggccatggattgacatggataagaaagaaagagctctggctatcatcaggaaatgttccagctactctaaagatgtatgaaaaagaaatagccagaggcaggtgatcactttcatgacaccaaacacagcattgggtaccagagttcatgtcacaccagagggaaaattctgtacacaatgatgaaaattaataccactaccacttaagttcctatgtgacaactttcccaagaatcagagagatacaagtcaaaactccaagtcaatgcctctaacttctctgatgggttttaacctccagagtcagaatgttctttgccttactaggaaagccatctgtcatttgaaaactctgtacattttatcagcagcttatccatccattgcaaatatgtttttgtgccagccacaatatattgcttctatttggaccaatagggggatttgaaggaattc

SEQ ID NO: 75 - DNA, 145 bp, Homo sapiens
gtggtcaatcacacctctcatgtacccagcctcctttgtgttcaagatccccagcacagcctacgtggtgctcaccagcgtgaacctcttcattggcattaatggcagcgtggccacctttgtgctggagctgttcaccgacaat

SEQ ID NO: 76 - DNA, 271 bp, Homo sapiens
gtgagtgaagcagtggctgtaggatgctttaatggagatggcactctgcataggccttggtaccctgaactttgttttggaaagaagcaggtgactaagcacaggatgttcccccacccccatgcccagtaacagggctcatgccaacacagctggttgtggcatgggttttgtgacacaaccatttgtctgtgtctctgatagcattgagaaaagtgaaagggcagttttgaaggtaaggaaaatagtggtatttgcttggatccactgg

SEQ ID NO: 77 - DNA, 271 bp, Homo sapiens
gtgagtgaagcagtggctgtaggatgctttaatggagatggcactctgcataggccttggtaccctgaactttgttttggaaagaagcaggtgactaagcacaggatgttcccccacccccatgcccagtaacagggctcatgccaacacagctggttgtggcatgggttttgtgacacaaccatttgtctgtgtctctgatagcattgagaaaagtgaaagggcagttttgaaggtaaggaaaatagtgtcatttgcttggatccactgg

SEQ ID NO: 78 - DNA, 264 bp, Homo sapiens
gtgagctttttcttagaacccgtggagcacctggttgagggtcacagaggaggcgcacagggaaacactcaccaatgggggttgcattgaactgaactcaaaatatgtgataaaactgattttcctgatgtgggcatcccgcagctccctccctgcccatcctggagactgtggcaagtaggttttataatactacgttagagactgaatctttgtcctgaaaaatagtttgaaaggttcatttttcttgttttttcccccaag

SEQ ID NO: 79 - DNA, 176 bp, Homo sapiens
gtgcctgctcccaccacacgagtcccttctccctgctttggctcctcaccagttgtcaggttatgattatagaatctagtcctactcagtgaaagaactttcatacacgtatgtgtaggacagcatgataaaattcccaagccagaccaaagtcaaggtgctttttatcactgtag

SEQ ID NO: 80 - DNA, 135 bp, Homo sapiens
gttggtgagtgggcgattcggaaactgggcctcgtgaagtatggagaaaaatatgctggtaactatagtggaggcaacaaacgcaagctctctacagccatggctttgatcggtgggcctcctgtggtgtttctg

SEQ ID NO: 81 - DNA, 376 bp, Homo sapiens
  modified_base (72): a, t, c or g
  modified_base (206): a, t, c or g
aaaggaatttcaccccaatcttatactgacttcaatagagctttcagacaaaaagttgttttgtatatactnatcagtcatgaaaagataattacaactaaatggcctttttccttccctatttatttggagaaatttaattacataagaaagtactcagaatatgtgagtttcctgcatcaataagacatttataataatgaccntgtttacaaatgaatttgaaagttactctaattctttgattcatcaagaaataactagaatggcaagttaaaatttaagctgtttcaaagatgcttctgcatttaaaaacaaatttatctttgattttttttcccctcagcaaataagacttattttattctaattacag

SEQ ID NO: 82 - DNA, 272 bp, Homo sapiens
gtaataaagatagtttctttgggatagtgcctagtgagaaggcttgatatttattcttttgtgagtatataaatggtgcctctaaaataaagggaaataaaactgagcaaaacagtgtagtggaaagaatgagggctttgaagtccgaactgcattcaaattctgtctttaccatttactggttctgtgactcttgggcaagttacttaactactgtaagagttagtttccctggaagatctacctcctagctttgtgctatagatgaaatg

SEQ ID NO: 83 - DNA, 272 bp, Homo sapiens
gtaataaagataatttctttgggatagtgcctagtgagaaggcttgatatttattcttttgtgagtatataaatggtgcctctaacataaagggaaataaaactgagcaaaacagtgtagtggaaagaatgagggctttgaagtccgaactgcattcaaattctgtctttaccatttactggttctgtgactcttgggcaagttacttaactactgtaagagttagtttccctggaagatctacctcctagctttgtgctatagatgaaatg

SEQ ID NO: 84 - DNA, 2894 bp, Homo sapiens
  modified_base (180): a, t, c or g
gtatttgtgaactttgccaaggaccaaagtgatgatgaccacttaaaagacctctcattacacaaaaaccagacagtagtggacgttgcagttctcacatcttttctacaggatgagaaagtgaaagaaagctatgtatgaagaatcctgttcatacggggtggctgaaagtaaagaggnactagactttcctttgcaccatgtgaagtgttgtggagaaaagagccagaagttgatgtgggaagaagtaaactggatactgtactgatactattcaatgcaatgcaattcaatgcaatgaaaacaaaattccattacaggggcagtgcctttgtagcctatgtcttgtatggctctcaagtgaaagacttgaattcagttttttacctatacctatgtgaaactctattatggaacccaatggacatatgggtttgaactcacactttttttttttttttgttcctgtgtattctcattggggttgcaacaataattcatcaagtaatcatggccagcgattattgatcaaaatcaaaaggtaatgcacatcctcattcactaagccatgccatgcccaggagactggtttcccggtgacacatccattgctggcaatgagtgtgccagagttattagtgccaagtttttcagaaagtttgaagcaccatggtgtgtcatgctcacttttgtgaaagctgctctgctcagagtctatcaacattgaatatcagttgacagaatggtgccatgcgtggctaacatcctgctttgattccctctgataagctgttctggtggcagtaacatgcaacaaaaatgtgggtgtctctaggcacgggaaacttggttccattgttatattgtcctatgcttcgagccatgggtctacagggtcatccttatgagactcttaaatatacttagatcctggtaagaggcaaagaatcaacagccaaactgctggggctgcaagctgctgaagccagggcatgggattaaagagattgtgcgttcaaacctagggaagcctgtgcccatttgtcctgactgtctgctaacatggtacactgcatctcaagatgtttatctgacacaagtgtattatttctggctttttgaattaatctagaaaatgaaaagatggagttgtattttgacaaaaatgtttgtactttttaatgttatttggaattttaagttctatcagtgacttctgaatccttagaatggcctctttgtagaaccctgtggtatagaggagtatggccactgccccactatttttattttcttatgtaagtttgcatatcagtcatgactagtgcctagaaagcaatgtgatggtcaggatctcatgacattatatttgagtttctttcagatcatttaggatactcttaatctcacttcatcaatcaaatattttttgagtgtatgctgtagctgaaagagtatgtacgtacgtataagactagagagatattaagtctcagtacacttcctgtgccatgttattcagctcactggtttacaaatataggttgtcttgtggttgtaggagcccactgtaacaatactgggcagcctttttttttttttttaattgcaacaatgcaaaagccaagaaagtataagggtcacaagtctaaacaatgaattcttcaacagggaaaacagctagcttgaaaacttgctgaaaaacacaacttgtgtttatggcatttagtaccttcaaataattggctttgcagatattggataccccattaaatctgacagtctcaaatttttcatctcttcaatcactagtcaagaaaaatataaaaacaacaaatacttccatatggagcatttttcagagttttctaacccagtcttatttttctagtcagtaaacatttgtaaaaatactgtttcactaatacttactgttaactgtcttgagagaaaagaaaaatatgagagaactattgtttggggaagttcaagtgatctttcaatatcattactaacttcttccactttttccaaaatttgaatattaacgctaaaggtgtaagacttcagatttcaaattaatctttctatattttttaaatttacagaatattatataacccactgctgaaaaagaaaaaaatgattgttttagaagttaaagtcaatattgattttaaatataagtaatgaaggcatatttccaataactagtgatatggcatcgttgcattttacagtatcttcaaaaatacagaatttatagaataatttctcctcatttaatatttttcaaaatcaaagttatggtttcctcattttactaaaatcgtattctaattcttcattatagtaaatctatgagcaactccttacttcggttcctctgatttcaaggccatattttaaaaaatcaaaaggcactgtgaactattttgaagaaaacacaacattttaatacagattgaaaggacctcttctgaagctagaaacaatctatagttatacatcttcattaatactgtgttaccttttaaaatagtaattttttacattttcctgtgtaaacctaattgtggtagaaatttttaccaactctatactcaatcaagcaaaatttctgtatattccctgtggaatgtacctatgtgagtttcagaaattctcaaaatacgtgttcaaaaatttctgcttttgcatctttgggacacctcagaaaacttattaacaactgtgaatatgagaaatacagaagaaaataataagccctctatacataaatgcccagcacaattcattgttaaaaaacaaccaaacctcacactactgtatttcattatctgtactgaaagcaaatgctttgtgactattaaatgttgcacatcattcattca

SEQ ID NO: 85 - DNA, 2894 bp, Homo sapiens
  modified_base (180): a, t, c or g
gtatttgtgaactttgccaaggaccaaagtgatgatgaccacttaaaagacctctcattacacaaaaaccagacagtagtggacgttgcagttctcacatcttttctacaggatgagaaagtgaaagaaagctatgtatgaagaatcctgttcatacggggtggctgaaagtaaagaggnactagactttcctttgcaccatgtgaagtgttgtggagaaaagagccagaagttgatgtgggaagaagtaaactggatactgtactgatactattcaatgcaatgcaattcaatgcaatgaaaacaaaattccattacaggggcagtgcctttgtagcctatgtcttgtatggctctcaagtgaaagacttgaatttagttttttacctatacctatgtgaaactctattatggaacccaatggacatatgggtttgaactcacactttttttttttttttgttcctgtgtattctcattggggttgcaacaataattcatcaagtaatcatggccagcgattattgatcaaaatcaaaaggtaatgcacatcctcattcactaagccatgccatgcccaggagactggtttcccggtgacacatccattgctggcaatgagtgtgccagagttattagtgccaagtttttcagaaagtttgaagcaccatggtgtgtcatgctcacttttgtgaaagctgctctgctcagagtctatcaacattgaatatcagttgacagaatggtgccatgcgtggctaacatcctgctttgattccctctgataagctgttctggtggcagtaacatgcaacaaaaatgtgggtgtctccaggcacgggaaacttggttccattgttatattgtcctatgcttcgagccatgggtctacagggtcatccttatgagactcttaaatatacttagatcctggtaagaggcaaagaatcaacagccaaactgctggggctgcaagctgctgaagccagggcatgggattaaagagattgtgcgttcaaacctagggaagcctgtgcccatttgtcctgactgtctgctaacatggtacactgcatctcaagatgtttatctgacacaagtgtattatttctggctttttgaattaatctagaaaatgaaaagatggagttgtattttgacaaaaatgtttgtactttttaatgttatttggaattttaagttctatcagtgacttctgaatccttagaatggcctctttgtagaaccctgtggtatagaggagtatggccactgccccactatttttattttcttatgtaagtttgcatatcagtcatgactagtgcctagaaagcaatgtgatggtcaggatctcatgacattatatttgagtttctttcagatcatttaggatactcttaatctcacttcatcaatcaaatattttttgagtgtatgctgtagctgaaagagtatgtacgtacgtataagactagagagatattaagtctcagtacacttcctgtgccatgttattcagctcactggtttacaaatataggttgtcttgtggttgtaggagcccactgtaacaatactgggcagcctttttttttttttttaattgcaacaatgcaaaagccaagaaagtataagggtcacaagtctaaacaatgaattcttcaacagggaaaacagctagcttgaaaacttgctgaaaaacacaacttgtgtttatggcatttagtaccttcaaataattggctttgcagatattggataccccattaaatctgacagtctcaaatttttcatctcttcaatcactagtcaagaaaaatataaaaacaacaaatacttccatatggagcatttttcagagttttctaacccagtcttatttttctagtcagtaaacatttgtaaaaatactgtttcactaatacttactgttaactgtcttgagagaaaagaaaaatatgagagaactattgtttggggaagttcaagtgatctttcaatatcattactaacttcttccactttttccaaaatttgaatattaacgctaaaggtgtaagacttcagatttcaaattaatctttctatattttttaaatttacagaatattatataacccactgctgaaaaagaaaaaaatgattgttttagaagttaaagtcaatattgattttaaatataagtaatgaaggcatatttccaataactagtgatatggcatcgttgcattttacagtatcttcaaaaatacagaatttatagaataatttctcctcatttaatatttttcaaaatcaaagttatggtttcctcattttactaaaatcgtattctaattcttcattatagtaaatctatgagcaactccttacttcggttcctctgatttcaaggccatattttaaaaaatcaaaaggcactgtgaactattttgaagaaaacacaacattttaatacagattgaaaggacctcttctgaagctagaaacaatctatagttatacatcttcattaatactgtgttaccttttaaaatagtaattttttacattttcctgtgtaaacctaattgtggtagaaatttttaccaactctatactcaatcaagcaaaatttctgtatattccctgtggaatgtacctatgtgagtttcagaaattctcaaaatacgtgttcaaaaatttctgcttttgcatctttgggacacctcagaaaacttattaacaactgtgaatatgagaaatacagaagaaaataataagccctctatacataaatgcccagcacaattcattgttaaaaaacaaccaaacctcacactactgtatttcattatctgtactgaaagcaaatgctttgtgactattaaatgttgcacatcattcattca

SEQ ID NO: 86 - DNA, 2894 bp, Homo sapiens
  modified_base (180): a, t, c or g
gtatttgtgaactttgccaaggaccaaagtgatgatgaccacttaaaagacctctcattacacaaaaaccagacagtagtggacgttgcagttctcacatcttttctacaggatgagaaagtgaaagaaagctatgtatgaagaatcctgttcatacggggtggctgaaagtaaagaggnactagactttcctttgcaccatgtgaagtgttgtggagaaaagagccagaagttgatgtgggaagaagtaaactggatactgtactgatactattcaatgcaatgcaattcaatgcaatgaaaacaaaattccattacaggggcagtgcctttgtagcctatgtcttgtatggctctcaagtgaaagacttgaatttagttttttacctatacctatgtgaaactctattatggaacccaatggacatatgggtttgaactcacactttttttttttttttgttcctgtgtattctcattggggttgcaacaataattcatcaagtaatcatggccagcgattattgatcaaaatcaaaaggtaatgcacatcctcattcactaagccatgccatgcccaggagactggtttcccggtgacacatccattgctggcaatgagtgtgccagagttattagtgccaagtttttcagaaagtttgaagcaccatggtgtgtcatgctcacttttgtgaaagctgctctgctcagagtctatcaacattgaatatcagttgacagaatggtgccatgcgtggctaacatcctgctttgattccctctgataagctgttctggtggcagtaacatgcaacaaaaatgtgggtgtctctaggcacgggaaacttggttccattgttatattgtcctatgcttcgagccatgggtctacagggtcatccttatgagactcttaaatatacttagatcctggtaagaggcaaagaatcaacagccaaactgctggggctgcaagctgctgaagccagggcatgggattaaagagattgtgcgttcaaacctagggaagcctgtgcccatttgtcctgactgtctgctaacatggtacactgcatctcaagatgtttatctgacacaagtgtattatttctggctttttgaattaatctagaaaatgaaaagatggagttgtattttgacaaaaatgtttgtactttttaatgttatttggaattttaagttctatcagtgacttctgaatccttagaatggcctctttgtagaaccctgtggtatagaggagtatggccactgccccactatttttattttcttatgtaagtttgcatatcagtcatgactagtgcctagaaagcaatgtgatggtcaggatctcatgacattatatttgagtttctttcagatcatttaggatactcttaatctcacttcatcaatcaaatattttttgagtgtatgctgtagctgaaagagtatgtacgtacgtataagactagagagatattaagtctcagtacacttcctgtgccatgttattcagctcactggtttacaaatataggttgtcttgtggttgtaggagcccactgtaacaatattgggcagcctttttttttttttttaattgcaacaatgcaaaagccaagaaagtataagggtcacaagtctaaacaatgaattcttcaacagggaaaacagctagcttgaaaacttgctgaaaaacacaacttgtgtttatggcatttagtaccttcaaataattggctttgcagatattggataccccattaaatctgacagtctcaaatttttcatctcttcaatcactagtcaagaaaaatataaaaacaacaaatacttccatatggagcatttttcagagttttctaacccagtcttatttttctagtcagtaaacatttgtaaaaatactgtttcactaatacttactgttaactgtcttgagagaaaagaaaaatatgagagaactattgtttggggaagttcaagtgatctttcaatatcattactaacttcttccactttttccaaaatttgaatattaacgctaaaggtgtaagacttcagatttcaaattaatctttctatattttttaaatttacagaatattatataacccactgctgaaaaagaaaaaaatgattgttttagaagttaaagtcaatattgattttaaatataagtaatgaaggcatatttccaataactagtgatatggcatcgttgcattttacagtatcttcaaaaatacagaatttatagaataatttctcctcatttaatatttttcaaaatcaaagttatggtttcctcattttactaaaatcgtattctaattcttcattatagtaaatctatgagcaactccttacttcggttcctctgatttcaaggccatattttaaaaaatcaaaaggcactgtgaactattttgaagaaaacacaacattttaatacagattgaaaggacctcttctgaagctagaaacaatctatagttatacatcttcattaatactgtgttaccttttaaaatagtaattttttacattttcctgtgtaaacctaattgtggtagaaatttttaccaactctatactcaatcaagcaaaatttctgtatattccctgtggaatgtacctatgtgagtttcagaaattctcaaaatacgtgttcaaaaatttctgcttttgcatctttgggacacctcagaaaacttattaacaactgtgaatatgagaaatacagaagaaaataataagccctctatacataaatgcccagcacaattcattgttaaaaaacaaccaaacctcacactactgtatttcattatctgtactgaaagcaaatgctttgtgactattaaatgttgcacatcattcattca

SEQ ID NO: 87 - DNA, 2894 bp, Homo sapiens
  modified_base (180): a, t, c or g
gtatttgtgaactttgccaaggaccaaagtgatgatgaccacttaaaagacctctcattacacaaaaaccagacagtagtggacgttgcagttctcacatcttttctacaggatgagaaagtgaaagaaagctatgtatgaagaatcctgttcatacggggtggctgaaagtaaagaggnactagactttcctttgcaccatgtgaagtgttgtggagaaaagagccagaagttgatgtgggaagaagtaaactggatactgtactgatactattcaatgcaatgcaattcaatgcaatgaaaacaaaattccattacaggggcagtgcctttgtagcctatgtcttgtatggctctcaagtgaaagacttgaatttagttttttacctatacctatgtgaaactctattatggaacccaatggacatatgggtttgaactcacactttttttttttttttgttcctgtgtattctcattggggttgcaacaataattcatcaagtaatcatggccagcgattattgatcaaaatcaaaaggtaatgcacatcctcattcactaagccatgccatgcccaggagactggtttcccggtgacacatccattgctggcaatgagtgtgccagagttattagtgccaagtttttcagaaagtttgaagcaccatggtgtgtcatgctcacttttgtgaaagctgctctgctcagagtctatcaacattgaatatcagttgacagaatggtgccatgcgtggctaacatcctgctttgattccctctgataagctgttctggtggcagtaacatgcaacaaaaatgtgggtgtctctaggcacgggaaacttggttccattgttatattgtcctatgcttcgagccatgggtctacagggtcatccttatgagactcttaaatatacttagatcctggtaagaggcaaagaatcaacagccaaactgctggggctgcaagctgctgaagccagggcatgggattaaagagattgtgcgttcaaacctagggaagcctgtgcccatttgtcctgactgtctgctaacatggtacactgcatctcaagatgtttatctgacacaagtgtattatttctggctttttgaattaatctagaaaatgaaaagatggagttgtattttgacaaaaatgtttgtactttttaatgttatttggaattttaagttctatcagtgacttctgaatccttagaatggcctctttgtagaaccctgtggtatagaggagtatggccactgccccactatttttattttcttatgtaagtttgcatatcagtcatgactagtgcctagaaagcaatgtgatggtcaggatctcatgacattatatttgagtttctttcagatcatttaggatactcttaatctcacttcatcaatcaaatattttttgagtgtatgctgtagctgaaagagtatgtacgtacgtataagactagagagatattaagtctcagtacacttcctgtgccatgttattcagctcactggtttacaaatataggttgtcttgtggttgtaggagcccactgtaacaatactgggcagcctttttttttttttttaattgcaacaatgcaaaagccaagaaagtataagggtcacaagtctaaacaatgaattcttcaacagggaaaacagctagcttgaaaacttgctgaaaaacacaacttgtgtttatggcatttagtaccttcaaataattggctttgcagatattggataccccattaaatctgacagtctcaaatatttcatctcttcaatcactagtcaagaaaaatataaaaacaacaaatacttccatatggagcatttttcagagttttctaacccagtcttatttttctagtcagtaaacatttgtaaaaatactgtttcactaatacttactgttaactgtcttgagagaaaagaaaaatatgagagaactattgtttggggaagttcaagtgatctttcaatatcattactaacttcttccactttttccaaaatttgaatattaacgctaaaggtgtaagacttcagatttcaaattaatctttctatattttttaaatttacagaatattatataacccactgctgaaaaagaaaaaaatgattgttttagaagttaaagtcaatattgattttaaatataagtaatgaaggcatatttccaataactagtgatatggcatcgttgcattttacagtatcttcaaaaatacagaatttatagaataatttctcctcatttaatatttttcaaaatcaaagttatggtttcctcattttactaaaatcgtattctaattcttcattatagtaaatctatgagcaactccttacttcggttcctctgatttcaaggccatattttaaaaaatcaaaaggcactgtgaactattttgaagaaaacacaacattttaatacagattgaaaggacctcttctgaagctagaaacaatctatagttatacatcttcattaatactgtgttaccttttaaaatagtaattttttacattttcctgtgtaaacctaattgtggtagaaatttttaccaactctatactcaatcaagcaaaatttctgtatattccctgtggaatgtacctatgtgagtttcagaaattctcaaaatacgtgttcaaaaatttctgcttttgcatctttgggacacctcagaaaacttattaacaactgtgaatatgagaaatacagaagaaaataataagccctctatacataaatgcccagcacaattcattgttaaaaaacaaccaaacctcacactactgtatttcattatctgtactgaaagcaaatgctttgtgactattaaatgttgcacatcattcattca

SEQ ID NO: 88 - DNA, 2894 bp, Homo sapiens
  modified_base (180): a, t, c or g
gtatttgtgaactttgccaaggaccaaagtgatgatgaccacttaaaagacctctcattacacaaaaaccagacagtagtggacgttgcagttctcacatcttttctacaggatgagaaagtgaaagaaagctatgtatgaagaatcctgttcatacggggtggctgaaagtaaagaggnactagactttcctttgcaccatgtgaagtgttgtggagaaaagagccagaagttgatgtgggaagaagtaaactggatactgtactgatactattcaatgcaatgcaattcaatgcaatgaaaacaaaattccattacaggggcagtgcctttgtagcctatgtcttgtatggctctcaagtgaaagacttgaatttagttttttacctatacctatgtgaaactctattatggaacccaatggacatatgggtttgaactcacactttttttttttttttgttcctgtgtattctcattggggttgcaacaataattcatcaagtaatcatggccagcgattattgatcaaaatcaaaaggtaatgcacatcctcattcactaagccatgccatgcccaggagactggtttcccggtgacacatccattgctggcaatgagtgtgccagagttattagtgccaagtttttcagaaagtttgaagcaccatggtgtgtcatgctcacttttgtgaaagctgctctgctcagagtctatcaacattgaatatcagttgacagaatggtgccatgcgtggctaacatcctgctttgattccctctgataagctgttctggtggcagtaacatgcaacaaaaatgtgggtgtctctaggcacgggaaacttggttccattgttatattgtcctatgcttcgagccatgggtctacagggtcatccttatgagactcttaaatatacttagatcctggtaagaggcaaagaatcaacagccaaactgctggggctgcaagctgctgaagccagggcatgggattaaagagattgtgcgttcaaacctagggaagcctgtgcccatttgtcctgactgtctgctaacatggtacactgcatctcaagatgtttatctgacacaagtgtattatttctggctttttgaattaatctagaaaatgaaaagatggagttgtattttgacaaaaatgtttgtactttttaatgttatttggaattttaagttctatcagtgacttctgaatccttagaatggcctctttgtagaaccctgtggtatagaggagtatggccactgccccactatttttattttcttatgtaagtttgcatatcagtcatgactagtgcctagaaagcaatgtgatggtcaggatctcatgacattatatttgagtttctttcagatcatttaggatactcttaatctcacttcatcaatcaaatattttttgagtgtatgctgtagctgaaagagtatgtacgtacgtataagactagagagatattaagtctcagtacacttcctgtgccatgttattcagctcactggtttacaaatataggttgtcttgtggttgtaggagcccactgtaacaatactgggcagcctttttttttttttttaattgcaacaatgcaaaagccaagaaagtataagggtcacaagtctaaacaatgaattcttcaacagggaaaacagctagcttgaaaacttgctgaaaaacacaacttgtgtttatggcatttagtaccttcaaataattggctttgcagatattggataccccattaaatctgacagtctcaaatttttcatctcttcaatcactagtcaagaaaaatataaaaacaacaaatacttccatatggagcatttttcagagttttctaacccagtcttatttttctagtcagtaaacatttgtaaaaatactgtttcactaatacttactgttaactgtcttgagagaaaagaaaaatatgagagaactattgtttggggaagttcaagtgatctttcaatatcattactaacttcttccactttttccagaatttgaatattaacgctaaaggtgtaagacttcagatttcaaattaatctttctatattttttaaatttacagaatattatataacccactgctgaaaaagaaaaaaatgattgttttagaagttaaagtcaatattgattttaaatataagtaatgaaggcatatttccaataactagtgatatggcatcgttgcattttacagtatcttcaaaaatacagaatttatagaataatttctcctcatttaatatttttcaaaatcaaagttatggtttcctcattttactaaaatcgtattctaattcttcattatagtaaatctatgagcaactccttacttcggttcctctgatttcaaggccatattttaaaaaatcaaaaggcactgtgaactattttgaagaaaacacaacattttaatacagattgaaaggacctcttctgaagctagaaacaatctatagttatacatcttcattaatactgtgttaccttttaaaatagtaattttttacattttcctgtgtaaacctaattgtggtagaaatttttaccaactctatactcaatcaagcaaaatttctgtatattccctgtggaatgtacctatgtgagtttcagaaattctcaaaatacgtgttcaaaaatttctgcttttgcatctttgggacacctcagaaaacttattaacaactgtgaatatgagaaatacagaagaaaataataagccctctatacataaatgcccagcacaattcattgttaaaaaacaaccaaacctcacactactgtatttcattatctgtactgaaagcaaatgctttgtgactattaaatgttgcacatcattcattca

SEQ ID NO: 89 - DNA, 2894 bp, Homo sapiens
  modified_base (180): a, t, c or g
gtatttgtgaactttgccaaggaccaaagtgatgatgaccacttaaaagacctctcattacacaaaaaccagacagtagtggacgttgcagttctcacatcttttctacaggatgagaaagtgaaagaaagctatgtatgaagaatcctgttcatacggggtggctgaaagtaaagaggnactagactttcctttgcaccatgtgaagtgttgtggagaaaagagccagaagttgatgtgggaagaagtaaactggatactgtactgatactattcaatgcaatgcaattcaatgcaatgaaaacaaaattccattacaggggcagtgcctttgtagcctatgtcttgtatggctctcaagtgaaagacttgaatttagttttttacctatacctatgtgaaactctattatggaacccaatggacatatgggtttgaactcacactttttttttttttttgttcctgtgtattctcattggggttgcaacaataattcatcaagtaatcatggccagcgattattgatcaaaatcaaaaggtaatgcacatcctcattcactaagccatgccatgcccaggagactggtttcccggtgacacatccattgctggcaatgagtgtgccagagttattagtgccaagtttttcagaaagtttgaagcaccatggtgtgtcatgctcacttttgtgaaagctgctctgctcagagtctatcaacattgaatatcagttgacagaatggtgccatgcgtggctaacatcctgctttgattccctctgataagctgttctggtggcagtaacatgcaacaaaaatgtgggtgtctctaggcacgggaaacttggttccattgttatattgtcctatgcttcgagccatgggtctacagggtcatccttatgagactcttaaatatacttagatcctggtaagaggcaaagaatcaacagccaaactgctggggctgcaagctgctgaagccagggcatgggattaaagagattgtgcgttcaaacctagggaagcctgtgcccatttgtcctgactgtctgctaacatggtacactgcatctcaagatgtttatctgacacaagtgtattatttctggctttttgaattaatctagaaaatgaaaagatggagttgtattttgacaaaaatgtttgtactttttaatgttatttggaattttaagttctatcagtgacttctgaatccttagaatggcctctttgtagaaccctgtggtatagaggagtatggccactgccccactatttttattttcttatgtaagtttgcatatcagtcatgactagtgcctagaaagcaatgtgatggtcaggatctcatgacattatatttgagtttctttcagatcatttaggatactcttaatctcacttcatcaatcaaatattttttgagtgtatgctgtagctgaaagagtatgtacgtacgtataagactagagagatattaagtctcagtacacttcctgtgccatgttattcagctcactggtttacaaatataggttgtcttgtggttgtaggagcccactgtaacaatactgggcagcctttttttttttttttaattgcaacaatgcaaaagccaagaaagtataagggtcacaagtctaaacaatgaattcttcaacagggaaaacagctagcttgaaaacttgctgaaaaacacaacttgtgtttatggcatttagtaccttcaaataattggctttgcagatattggataccccattaaatctgacagtctcaaatttttcatctcttcaatcactagtcaagaaaaatataaaaacaacaaatacttccatatggagcatttttcagagttttctaacccagtcttatttttctagtcagtaaacatttgtaaaaatactgtttcactaatacttactgttaactgtcttgagagaaaagaaaaatatgagagaactattgtttggggaagttcaagtgatctttcaatatcattactaacttcttccactttttccaaaatttgaatattaatgctaaaggtgtaagacttcagatttcaaattaatctttctatattttttaaatttacagaatattatataacccactgctgaaaaagaaaaaaatgattgttttagaagttaaagtcaatattgattttaaatataagtaatgaaggcatatttccaataactagtgatatggcatcgttgcattttacagtatcttcaaaaatacagaatttatagaataatttctcctcatttaatatttttcaaaatcaaagttatggtttcctcattttactaaaatcgtattctaattcttcattatagtaaatctatgagcaactccttacttcggttcctctgatttcaaggccatattttaaaaaatcaaaaggcactgtgaactattttgaagaaaacacaacattttaatacagattgaaaggacctcttctgaagctagaaacaatctatagttatacatcttcattaatactgtgttaccttttaaaatagtaattttttacattttcctgtgtaaacctaattgtggtagaaatttttaccaactctatactcaatcaagcaaaatttctgtatattccctgtggaatgtacctatgtgagtttcagaaattctcaaaatacgtgttcaaaaatttctgcttttgcatctttgggacacctcagaaaacttattaacaactgtgaatatgagaaatacagaagaaaataataagccctctatacataaatgcccagcacaattcattgttaaaaaacaaccaaacctcacactactgtatttcattatctgtactgaaagcaaatgctttgtgactattaaatgttgcacatcattcattca

SEQ ID NO: 90 - DNA, 2894 bp, Homo sapiens
  modified_base (180): a, t, c or g
gtatttgtgaactttgccaaggaccaaagtgatgatgaccacttaaaagacctctcattacacaaaaaccagacagtagtggacgttgcagttctcacatcttttctacaggatgagaaagtgaaagaaagctatgtatgaagaatcctgttcatacggggtggctgaaagtaaagaggnactagactttcctttgcaccatgtgaagtgttgtggagaaaagagccagaagttgatgtgggaagaagtaaactggatactgtactgatactattcaatgcaatgcaattcaatgcaatgaaaacaaaattccattacaggggcagtgcctttgtagcctatgtcttgtatggctctcaagtgaaagacttgaatttagttttttacctatacctatgtgaaactctattatggaacccaatggacatatgggtttgaactcacactttttttttttttttgttcctgtgtattctcattggggttgcaacaataattcatcaagtaatcatggccagcgattattgatcaaaatcaaaaggtaatgcacatcctcattcactaagccatgccatgcccaggagactggtttcccggtgacacatccattgctggcaatgagtgtgccagagttattagtgccaagtttttcagaaagtttgaagcaccatggtgtgtcatgctcacttttgtgaaagctgctctgctcagagtctatcaacattgaatatcagttgacagaatggtgccatgcgtggctaacatcctgctttgattccctctgataagctgttctggtggcagtaacatgcaacaaaaatgtgggtgtctctaggcacgggaaacttggttccattgttatattgtcctatgcttcgagccatgggtctacagggtcatccttatgagactcttaaatatacttagatcctggtaagaggcaaagaatcaacagccaaactgctggggctgcaagctgctgaagccagggcatgggattaaagagattgtgcgttcaaacctagggaagcctgtgcccatttgtcctgactgtctgctaacatggtacactgcatctcaagatgtttatctgacacaagtgtattatttctggctttttgaattaatctagaaaatgaaaagatggagttgtattttgacaaaaatgtttgtactttttaatgttatttggaattttaagttctatcagtgacttctgaatccttagaatggcctctttgtagaaccctgtggtatagaggagtatggccactgccccactatttttattttcttatgtaagtttgcatatcagtcatgactagtgcctagaaagcaatgtgatggtcaggatctcatgacattatatttgagtttctttcagatcatttaggatactcttaatctcacttcatcaatcaaatattttttgagtgtatgctgtagctgaaagagtatgtacgtacgtataagactagagagatattaagtctcagtacacttcctgtgccatgttattcagctcactggtttacaaatataggttgtcttgtggttgtaggagcccactgtaacaatactgggcagcctttttttttttttttaattgcaacaatgcaaaagccaagaaagtataagggtcacaagtctaaacaatgaattcttcaacagggaaaacagctagcttgaaaacttgctgaaaaacacaacttgtgtttatggcatttagtaccttcaaataattggctttgcagatattggataccccattaaatctgacagtctcaaatttttcatctcttcaatcactagtcaagaaaaatataaaaacaacaaatacttccatatggagcatttttcagagttttctaacccagtcttatttttctagtcagtaaacatttgtaaaaatactgtttcactaatacttactgttaactgtcttgagagaaaagaaaaatatgagagaactattgtttggggaagttcaagtgatctttcaatatcattactaacttcttccactttttccaaaatttgaatattaacgctaaaggtgtaagacttcagatttcaaattaatctttctatattttttaaatttacagaatattatataacccactgctgaaaaagaaaaaaatgattgttttagaagttaaagtcaatattgattttaaatataagtaatgaaggcatatttccaataactagtgatatggcatcgttgcattttacagtatcttcaaaaatacagaatttatagaataatttctcctcatttaatatttttcaaaatcaaagttatggtttcctcattttactaaaatcgtattctaattcttcattatagtaaatctatgagcaactccttacttcggttcctctgatttcaaggccatattttaaaaaatcaaaaggcactgtgaactattttgaagaaaacacgacattttaatacagattgaaaggacctcttctgaagctagaaacaatctatagttatacatcttcattaatactgtgttaccttttaaaatagtaattttttacattttcctgtgtaaacctaattgtggtagaaatttttaccaactctatactcaatcaagcaaaatttctgtatattccctgtggaatgtacctatgtgagtttcagaaattctcaaaatacgtgttcaaaaatttctgcttttgcatctttgggacacctcagaaaacttattaacaactgtgaatatgagaaatacagaagaaaataataagccctctatacataaatgcccagcacaattcattgttaaaaaacaaccaaacctcacactactgtatttcattatctgtactgaaagcaaatgctttgtgactattaaatgttgcacatcattcattca

SEQ ID NO: 91 - DNA, 2894 bp, Homo sapiens
  modified_base (180): a, t, c or g
gtatttgtgaactttgccaaggaccaaagtgatgatgaccacttaaaagacctctcattacacaaaaaccagacagtagtggacgttgcagttctcacatcttttctacaggatgagaaagtgaaagaaagctatgtatgaagaatcctgttcatacggggtggctgaaagtaaagaggnactagactttcctttgcaccatgtgaagtgttgtggagaaaagagccagaagttgatgtgggaagaagtaaactggatactgtactgatactattcaatgcaatgcaattcaatgcaatgaaaacaaaattccattacaggggcagtgcctttgtagcctatgtcttgtatggctctcaagtgaaagacttgaatttagttttttacctatacctatgtgaaactctattatggaacccaatggacatatgggtttgaactcacactttttttttttttttgttcctgtgtattctcattggggttgcaacaataattcatcaagtaatcatggccagcgattattgatcaaaatcaaaaggtaatgcacatcctcattcactaagccatgccatgcccaggagactggtttcccggtgacacatccattgctggcaatgagtgtgccagagttattagtgccaagtttttcagaaagtttgaagcaccatggtgtgtcatgctcacttttgtgaaagctgctctgctcagagtctatcaacattgaatatcagttgacagaatggtgccatgcgtggctaacatcctgctttgattccctctgataagctgttctggtggcagtaacatgcaacaaaaatgtgggtgtctctaggcacgggaaacttggttccattgttatattgtcctatgcttcgagccatgggtctacagggtcatccttatgagactcttaaatatacttagatcctggtaagaggcaaagaatcaacagccaaactgctggggctgcaagctgctgaagccagggcatgggattaaagagattgtgcgttcaaacctagggaagcctgtgcccatttgtcctgactgtctgctaacatggtacactgcatctcaagatgtttatctgacacaagtgtattatttctggctttttgaattaatctagaaaatgaaaagatggagttgtattttgacaaaaatgtttgtactttttaatgttatttggaattttaagttctatcagtgacttctgaatccttagaatggcctctttgtagaaccctgtggtatagaggagtatggccactgccccactatttttattttcttatgtaagtttgcatatcagtcatgactagtgcctagaaagcaatgtgatggtcaggatctcatgacattatatttgagtttctttcagatcatttaggatactcttaatctcacttcatcaatcaaatattttttgagtgtatgctgtagctgaaagagtatgtacgtacgtataagactagagagatattaagtctcagtacacttcctgtgccatgttattcagctcactggtttacaaatataggttgtcttgtggttgtaggagcccactgtaacaatactgggcagcctttttttttttttttaattgcaacaatgcaaaagccaagaaagtataagggtcacaagtctaaacaatgaattcttcaacagggaaaacagctagcttgaaaacttgctgaaaaacacaacttgtgtttatggcatttagtaccttcaaataattggctttgcagatattggataccccattaaatctgacagtctcaaatttttcatctcttcaatcactagtcaagaaaaatataaaaacaacaaatacttccatatggagcatttttcagagttttctaacccagtcttatttttctagtcagtaaacatttgtaaaaatactgtttcactaatacttactgttaactgtcttgagagaaaagaaaaatatgagagaactattgtttggggaagttcaagtgatctttcaatatcattactaacttcttccactttttccaaaatttgaatattaacgctaaaggtgtaagacttcagatttcaaattaatctttctatattttttaaatttacagaatattatataacccactgctgaaaaagaaaaaaatgattgttttagaagttaaagtcaatattgattttaaatataagtaatgaaggcatatttccaataactagtgatatggcatcgttgcattttacagtatcttcaaaaatacagaatttatagaataatttctcctcatttaatatttttcaaaatcaaagttatggtttcctcattttactaaaatcgtattctaattcttcattatagtaaatctatgagcaactccttacttcggttcctctgatttcaaggccatattttaaaaaatcaaaaggcactgtgaactattttgaagaaaacacaacattttaatacagattgaaaggacctcttctgaagctagaaacaatctatagttatacatcttcattaatactgtgttaccttttaaaatagtaattttttacattttcctgtgtaaacctaattgtggtagaaatttttaccaactctatactcaatcaagcaaaatttctgtatattccctgtggaatgtacctatgtgagtttcagaaattctcaaaatacgtgttcaaaaatttctgcttttgcatctttgggacacctcagaaaacttattaacaactgtgaatatgagaaatacagaagaaaataataagccctctatacataaatgcccagcacaattcattgttaaaaaacaaccaaacctcacactactgtatttcattatctatactgaaagcaaatgctttgtgactattaaatgttgcacatcattcattca

SEQ ID NO: 92 - DNA, 9870 bp, Homo sapiens
  modified_base (7138): a, t, c or g
gtaattgcgagcgagagtgagtggggccgggaccggcagagccgagccgacccttctctcccgggctgcggcagggcagggcggggagctccgcgcaccaacagagccggttctcagggcgctttgctccttgttttttccccggttctgttttctccccttctccggaaggcttgtcaaggggtaggagaaagagacgcaaacacaaaagtggaaaacagttaatgaccagccacggcgtccctgctgtgagctctggccgctgccttccagggctcccgagccacacgctgggggtgctggctgagggaacatggcttgttggcctcagctgaggttgctgctgtggaagaacctcactttcagaagaagacaaacatgtcagctgctgctggaagtggcctggcctctatttatcttcctgatcctgatctctgttcggctgagctacccaccctatgaacaacatgaatgccattttccaaataaagccatgccctctgcaggaacacttccttgggttcaggggattatctgtaatgccaacaacccctgtttccgttacccgactcctggggaggctcccggagttgttggaaactttaacaaatccattgtggctcgcctgttctcagatgctcggaggcttcttttatacagccagaaagacaccagcatgaaggacatgcgcaaagttctgagaacattacagcagatcaagaaatccagctcaaacttgaagcttcaagatttcctggtggacaatgaaaccttctctgggttcctgtatcacaacctctctctcccaaagtctactgtggacaagatgctgagggctgatgtcattctccacaaggtatttttgcaaggctaccagttacatttgacaagtctgtgcaatggatcaaaatcagaagagatgattcaacttggtgaccaagaagtttctgagctttgtggcctaccaagggagaaactggctgcagcagagcgagtacttcgttccaacatggacatcctgaagccaatcctgagaacactaaactctacatctcccttcccgagcaaggagctggccgaagccacaaaaacattgctgcatagtcttgggactctggcccaggagctgttcagcatgagaagctggagtgacatgcgacaggaggtgatgtttctgaccaatgtgaacagctccagctcctccacccaaatctaccaggctgtgtctcgtattgtctgcgggcatcccgagggaggggggctgaagatcaagtctctcaactggtatgaggacaacaactacaaagccctctttggaggcaatggcactgaggaagatgctgaaaccttctatgacaactctacaactccttactgcaatgatttgatgaagaatttggagtctagtcctctttcccgcattatctggaaagctctgaagccgctgctcgttgggaagatcctgtatacacctgacactccagccacaaggcaggtcatggctgaggtgaacaagaccttccaggaactggctgtgttccatgatctggaaggcatgtgggaggaactcagccccaagatctggaccttcatggagaacagccaagaaatggaccttgtccggatgctgttggacagcagggacaatgaccacttttgggaacagcagttggatggcttagattggacagcccaagacatcgtggcgtttttggccaagcacccagaggatgtccagtccagtaatggttctgtgtacacctggagagaagctttcaacgagactaaccaggcaatccggaccatatctcgcttcatggagtgtgtcaacctgaacaagctagaacccatagcaacagaagtctggctcatcaacaagtccatggagctgctggatgagaggaagttctgggctggtattgtgttcactggaattactccaggcagcattgagctgccccatcatgtcaagtacaagatccgaatggacattgacaatgtggagaggacaaataaaatcaaggatgggtactgggaccctggtcctcgagctgacccctttgaggacatgcggtacgtctgggggggcttcgcctacttgcaggatgtggtggagcaggcaatcatcagggtgctgacgggcaccgagaagaaaactggtgtctatatgcaacagatgccctatccctgttacgttgatgacatctttctgcgggtgatgagccggtcaatgcccctcttcatgacgctggcctggatttactcagtggctgtgatcatcaagggcatcgtgtatgagaaggaggcacggctgaaagagaccatgcggatcatgggcctggacaacagcatcctctggtttagctggttcattagtagcctcattcctcttcttgtgagcgctggcctgctagtggtcatcctgaagttaggaaacctgctgccctacagtgatcccagcgtggtgtttgtcttcctgtccgtgtttgctgtggtgacaatcctgcagtgcttcctgattagcacactcttctccagagccaacctggcagcagcctgtgggggcatcatctacttcacgctgtacctgccctacgtcctgtgtgtggcatggcaggactacgtgggcttcacactcaagatcttcgctagcctgctgtctcctgtggcttttgggtttggctgtgagtactttgccctttttgaggagcagggcattggagtgcagtgggacaacctgtttgagagtcctgtggaggaagatggcttcaatctcaccacttcggtctccatgatgctgtttgacaccttcctctatggggtgatgacctggtacattgaggctgtctttccaggccagtacggaattcccaggccctggtattttccttgcaccaagtcctactggtttggcgaggaaagtgatgagaagagccaccctggttccaaccagaagagaatatcagaaatctgcatggaggaggaacccacccacttgaagctgggcgtgtccattcagaacctggtaaaagtctaccgagatgggatgaaggtggctgtcgatggcctggcactgaatttttatgagggccagatcacctccttcctgggccacaatggagcggggaagacgaccaccatgtcaatcctgaccgggttgttccccccgacctcgggcaccgcctacatcctgggaaaagacattcgctctgagatgagcaccatccggcagaacctgggggtctgtccccagcataacgtgctgtttgacatgctgactgtcgaagaacacatctggttctatgcccgcttgaaagggctctctgagaagcacgtgaaggcggagatggagcagatggccctggatgttggtttgccatcaagcaagctgaaaagcaaaacaagccagctgtcaggtggaatgcagagaaagctatctgtggccttggcctttgtcgggggatctaaggttgtcattctggatgaacccacagctggtgtggacccttactcccgcaggggaatatgggagctgctgctgaaataccgacaaggccgcaccattattctctctacacaccacatggatgaagcggacgtcctgggggacaggattgccatcatctcccatgggaagctgtgctgtgtgggctcctccctgtttctgaagaaccagctgggaacaggctactacctgaccttggtcaagaaagatgtggaatcctccctcagttcctgcagaaacagtagtagcactgtgtcatacctgaaaaaggaggacagtgtttctcagagcagttctgatgctggcctgggcagcgaccatgagagtgacacgctgaccatcgatgtctctgctatctccaacctcatcaggaagcatgtgtctgaagcccggctggtggaagacatagggcatgagctgacctatgtgctgccatatgaagctgctaaggagggagcctttgtggaactctttcatgagattgatgaccggctctcagacctgggcatttctagttatggcatctcagagacgaccctggaagaaatattcctcaaggtggccgaagagagtggggtggatgctgagacctcagatggtaccttgccagcaagacgaaacaggcgggccttcggggacaagcagagctgtcttcgcccgttcactgaagatgatgctgctgatccaaatgattctgacatagacccagaatccagagagacagacttgctcagtgggatggatggcaaagggtcctaccaggtgaaaggctggaaacttacacagcaacagtttgtggcccttttgtggaagagactgctaattgccagacggagtcggaaaggattttttgctcagattgtcttgccagctgtgtttgtctgcattgcccttgtgttcagcctgatcgtgccaccctttggcaagtaccccagcctggaacttcagccctggatgtacaacgaacagtacacatttgtcagcaatgatgctcctgaggacacgggaaccctggaactcttaaacgccctcaccaaagaccctggcttcgggacccgctgtatggaaggaaacccaatcccagacacgccctgccaggcaggggaggaagagtggaccactgccccagttccccagaccatcatggacctcttccagaatgggaactggacaatgcagaacccttcacctgcatgccagtgtagcagcgacaaaatcaagaagatgctgcctgtgtgtcccccaggggcaggggggctgcctcctccacaaagaaaacaaaacactgcagatatccttcaggacctgacaggaagaaacatttcggattatctggtgaagacgtatgtgcagatcatagccaaaagcttaaagaacaagatctgggtgaatgagtttaggtatggcggcttttccctgggtgtcagtaatactcaagcacttcctccgagtcaagaagttaatgatgccaccaaacaaatgaagaaacacctaaagctggccaaggacagttctgcagatcgatttctcaacagcttgggaagatttatgacaggactggacaccagaaataatgtcaaggtgtggttcaataacaagggctggcatgcaatcagctctttcctgaatgtcatcaacaatgccattctccgggccaacctgcaaaagggagagaaccctagccattatggaattactgctttcaatcatcccctgaatctcaccaagcagcagctctcagaggtggctccgatgaccacatcagtggatgtccttgtgtccatctgtgtcatctttgcaatgtccttcgtcccagccagctttgtcgtattcctgatccaggagcgggtcagcaaagcaaaacacctgcagttcatcagtggagtgaagcctgtcatctactggctctctaattttgtctgggatatgtgcaattacgttgtccctgccacactggtcattatcatcttcatctgcttccagcagaagtcctatgtgtcctccaccaatctgcctgtgctagcccttctacttttgctgtatgggtggtcaatcacacctctcatgtacccagcctcctttgtgttcaagatccccagcacagcctatgtggtgctcaccagcgtgaacctcttcattggcattaatggcagcgtggccacctttgtgctggagctgttcaccgacaataagctgaataatatcaatgatatcctgaagtccgtgttcttgatcttcccacatttttgcctgggacgagggctcatcgacatggtgaaaaaccaggcaatggctgatgccctggaaaggtttggggagaatcgctttgtgtcaccattatcttgggacttggtgggacgaaacctcttcgccatggccgtggaaggggtggtgttcttcctcattactgttctgatccagtacagattcttcatcaggcccagacctgtaaatgcaaagctatctcctctgaatgatgaagatgaagatgtgaggcgggaaagacagagaattcttgatggtggaggccagaatgacatcttagaaatcaaggagttgacgaagatatatagaaggaagcggaagcctgctgttgacaggatttgcgtgggcattcctcctggtgagtgctttgggctcctgggagttaatggggctggaaaatcatcaactttcaagatgttaacaggagataccactgttaccagaggagatgctttccttaacagaaatagtatcttatcaaacatccatgaagtacatcagaacatgggctactgccctcagtttgatgccatcacagagctgttgactgggagagaacacgtggagttctttgcccttttgagaggagtcccagagaaagaagttggcaaggttggtgagtgggcgattcggaaactgggcctcgtgaagtatggagaaaaatatgctggtaactatagtggaggcaacaaacgcaagctctctacagccatggctttgatcggcgggcctcctgtggtgtttctggatgaacccaccacaggcatggatcccaaagcccggcggttcttgtggaattgtgccctaagtgttgtcaaggaggggagatcagtagtgcttacatctcatagtatggaagaatgtgaagctctttgcactaggatggcaatcatggtcaatggaaggttcaggtgccttggcagtgtccagcatctaaaaaataggtttggagatggttatacaatagttgtacgaatagcagggtccaacccggacctgaagcctgtccaggatttctttggacttgcatttcctggaagtgttccaaaagagaaacaccggaacatgctacaataccagcttccatcttcattatcttctctggccaggatattcagcatcctctcccagagcaaaaagcgactccacatagaagactactctgtttctcagacaacacttgaccaagtatttgtgaactttgccaaggaccaaagtgatgatgaccacttaaaagacctctcattacacaaaaaccagacagtagtggacgttgcagttctcacatcttttctacaggatgagaaagtgaaagaaagctatgtatgaagaatcctgttcatacggggtggctgaaagtaaagaggnactagactttcctttgcaccatgtgaagtgttgtggagaaaagagccagaagttgatgtgggaagaagtaaactggatactgtactgatactattcaatgcaatgcaattcaatgcaatgaaaacaaaattccattacaggggcagtgcctttgtagcctatgtcttgtatggctctcaagtgaaagacttgaatttagttttttacctatacctatgtgaaactctattatggaacccaatggacatatgggtttgaactcacactttttttttttttttgttcctgtgtattctcattggggttgcaacaataattcatcaagtaatcatggccagcgattattgatcaaaatcaaaaggtaatgcacatcctcattcactaagccatgccatgcccaggagactggtttcccggtgacacatccattgctggcaatgagtgtgccagagttattagtgccaagtttttcagaaagtttgaagcaccatggtgtgtcatgctcacttttgtgaaagctgctctgctcagagtctatcaacattgaatatcagttgacagaatggtgccatgcgtggctaacatcctgctttgattccctctgataagctgttctggtggcagtaacatgcaacaaaaatgtgggtgtctctaggcacgggaaacttggttccattgttatattgtcctatgcttcgagccatgggtctacagggtcatccttatgagactcttaaatatacttagatcctggtaagaggcaaagaatcaacagccaaactgctggggctgcaagctgctgaagccagggcatgggattaaagagattgtgcgttcaaacctagggaagcctgtgcccatttgtcctgactgtctgctaacatggtacactgcatctcaagatgtttatctgacacaagtgtattatttctggctttttgaattaatctagaaaatgaaaagatggagttgtattttgacaaaaatgtttgtactttttaatgttatttggaattttaagttctatcagtgacttctgaatccttagaatggcctctttgtagaaccctgtggtatagaggagtatggccactgccccactatttttattttcttatgtaagtttgcatatcagtcatgactagtgcctagaaagcaatgtgatggtcaggatctcatgacattatatttgagtttctttcagatcatttaggatactcttaatctcacttcatcaatcaaatattttttgagtgtatgctgtagctgaaagagtatgtacgtacgtataagactagagagatattaagtctcagtacacttcctgtgccatgttattcagctcactggtttacaaatataggttgtcttgtggttgtaggagcccactgtaacaatactgggcagcctttttttttttttttaattgcaacaatgcaaaagccaagaaagtataagggtcacaagtctaaacaatgaattcttcaacagggaaaacagctagcttgaaaacttgctgaaaaacacaacttgtgtttatggcatttagtaccttcaaataattggctttgcagatattggataccccattaaatctgacagtctcaaatttttcatctcttcaatcactagtcaagaaaaatataaaaacaacaaatacttccatatggagcatttttcagagttttctaacccagtcttatttttctagtcagtaaacatttgtaaaaatactgtttcactaatacttactgttaactgtcttgagagaaaagaaaaatatgagagaactattgtttggggaagttcaagtgatctttcaatatcattactaacttcttccactttttccaaaatttgaatattaacgctaaaggtgtaagacttcagatttcaaattaatctttctatattttttaaatttacagaatattatataacccactgctgaaaaagaaaaaaatgattgttttagaagttaaagtcaatattgattttaaatataagtaatgaaggcatatttccaataactagtgatatggcatcgttgcattttacagtatcttcaaaaatacagaatttatagaataatttctcctcatttaatatttttcaaaatcaaagttatggtttcctcattttactaaaatcgtattctaattcttcattatagtaaatctatgagcaactccttacttcggttcctctgatttcaaggccatattttaaaaaatcaaaaggcactgtgaactattttgaagaaaacacaacattttaatacagattgaaaggacctcttctgaagctagaaacaatctatagttatacatcttcattaatactgtgttaccttttaaaatagtaattttttacattttcctgtgtaaacctaattgtggtagaaatttttaccaactctatactcaatcaagcaaaatttctgtatattccctgtggaatgtacctatgtgagtttcagaaattctcaaaatacgtgttcaaaaatttctgcttttgcatctttgggacacctcagaaaacttattaacaactgtgaatatgagaaatacagaagaaaataataagccctctatacataaatgcccagcacaattcattgttaaaaaacaaccaaacctcacactactgtatttcattatctgtactgaaagcaaatgctttgtgactattaaatgttgcacatcattcattcaaaaaaaaaaaaaaaaaaa

SEQ ID NO: 93 - DNA, 9870 bp, Homo sapiens
  modified_base (7138): a, t, c or g
gtaattgcgagcgagagtgagtggggccgggacccgcagagccgagccgacccttctctcccgggctgcggcagggcagggcggggagctccgcgcaccaacagagccggttctcagggcgctttgctccttgttttttccccggttctgttttctccccttctccggaaggcttgtcaaggggtaggagaaagagacgcaaacacaaaagtggaaaacagttaatgaccagccacggcgtccctgctgtgagctctggccgctgccttccagggctcccgagccacacgctgggggtgctggctgagggaacatggcttgttggcctcagctgaggttgctgctgtggaagaacctcactttcagaagaagacaaacatgtcagctgctgctggaagtggcctggcctctatttatcttcctgatcctgatctctgttcggctgagctacccaccctatgaacaacatgaatgccattttccaaataaagccatgccctctgcaggaacacttccttgggttcaggggattatctgtaatgccaacaacccctgtttccgttacccgactcctggggaggctcccggagttgttggaaactttaacaaatccattgtggctcgcctgttctcagatgctcggaggcttcttttatacagccagaaagacaccagcatgaaggacatgcgcaaagttctgagaacattacagcagatcaagaaatccagctcaaacttgaagcttcaagatttcctggtggacaatgaaaccttctctgggttcctgtatcacaacctctctctcccaaagtctactgtggacaagatgctgagggctgatgtcattctccacaaggtatttttgcaaggctaccagttacatttgacaagtctgtgcaatggatcaaaatcagaagagatgattcaacttggtgaccaagaagtttctgagctttgtggcctaccaagggagaaactggctgcagcagagcgagtacttcgttccaacatggacatcctgaagccaatcctgagaacactaaactctacatctcccttcccgagcaaggagctggccgaagccacaaaaacattgctgcatagtcttgggactctggcccaggagctgttcagcatgagaagctggagtgacatgcgacaggaggtgatgtttctgaccaatgtgaacagctccagctcctccacccaaatctaccaggctgtgtctcgtattgtctgcgggcatcccgagggaggggggctgaagatcaagtctctcaactggtatgaggacaacaactacaaagccctctttggaggcaatggcactgaggaagatgctgaaaccttctatgacaactctacaactccttactgcaatgatttgatgaagaatttggagtctagtcctctttcccgcattatctggaaagctctgaagccgctgctcgttgggaagatcctgtatacacctgacactccagccacaaggcaggtcatggctgaggtgaacaagaccttccaggaactggctgtgttccatgatctggaaggcatgtgggaggaactcagccccaagatctggaccttcatggagaacagccaagaaatggaccttgtccggatgctgttggacagcagggacaatgaccacttttgggaacagcagttggatggcttagattggacagcccaagacatcgtggcgtttttggccaagcacccagaggatgtccagtccagtaatggttctgtgtacacctggagagaagctttcaacgagactaaccaggcaatccggaccatatctcgcttcatggagtgtgtcaacctgaacaagctagaacccatagcaacagaagtctggctcatcaacaagtccatggagctgctggatgagaggaagttctgggctggtattgtgttcactggaattactccaggcagcattgagctgccccatcatgtcaagtacaagatccgaatggacattgacaatgtggagaggacaaataaaatcaaggatgggtactgggaccctggtcctcgagctgacccctttgaggacatgcggtacgtctgggggggcttcgcctacttgcaggatgtggtggagcaggcaatcatcagggtgctgacgggcaccgagaagaaaactggtgtctatatgcaacagatgccctatccctgttacgttgatgacatctttctgcgggtgatgagccggtcaatgcccctcttcatgacgctggcctggatttactcagtggctgtgatcatcaagggcatcgtgtatgagaaggaggcacggctgaaagagaccatgcggatcatgggcctggacaacagcatcctctggtttagctggttcattagtagcctcattcctcttcttgtgagcgctggcctgctagtggtcatcctgaagttaggaaacctgctgccctacagtgatcccagcgtggtgtttgtcttcctgtccgtgtttgctgtggtgacaatcctgcagtgcttcctgattagcacactcttctccagagccaacctggcagcagcctgtgggggcatcatctacttcacgctgtacctgccctacgtcctgtgtgtggcatggcaggactacgtgggcttcacactcaagatcttcgctagcctgctgtctcctgtggcttttgggtttggctgtgagtactttgccctttttgaggagcagggcattggagtgcagtgggacaacctgtttgagagtcctgtggaggaagatggcttcaatctcaccacttcggtctccatgatgctgtttgacaccttcctctatggggtgatgacctggtacattgaggctgtctttccaggccagtacggaattcccaggccctggtattttccttgcaccaagtcctactggtttggcgaggaaagtgatgagaagagccaccctggttccaaccagaagagaatatcagaaatctgcatggaggaggaacccacccacttgaagctgggcgtgtccattcagaacctggtaaaagtctaccgagatgggatgaaggtggctgtcgatggcctggcactgaatttttatgagggccagatcacctccttcctgggccacaatggagcggggaagacgaccaccatgtcaatcctgaccgggttgttccccccgacctcgggcaccgcctacatcctgggaaaagacattcgctctgagatgagcaccatccggcagaacctgggggtctgtccccagcataacgtgctgtttgacatgctgactgtcgaagaacacatctggttctatgcccgcttgaaagggctctctgagaagcacgtgaaggcggagatggagcagatggccctggatgttggtttgccatcaagcaagctgaaaagcaaaacaagccagctgtcaggtggaatgcagagaaagctatctgtggccttggcctttgtcgggggatctaaggttgtcattctggatgaacccacagctggtgtggacccttactcccgcaggggaatatgggagctgctgctgaaataccgacaaggccgcaccattattctctctacacaccacatggatgaagcggacgtcctgggggacaggattgccatcatctcccatgggaagctgtgctgtgtgggctcctccctgtttctgaagaaccagctgggaacaggctactacctgaccttggtcaagaaagatgtggaatcctccctcagttcctgcagaaacagtagtagcactgtgtcatacctgaaaaaggaggacagtgtttctcagagcagttctgatgctggcctgggcagcgaccatgagagtgacacgctgaccatcgatgtctctgctatctccaacctcatcaggaagcatgtgtctgaagcccggctggtggaagacatagggcatgagctgacctatgtgctgccatatgaagctgctaaggagggagcctttgtggaactctttcatgagattgatgaccggctctcagacctgggcatttctagttatggcatctcagagacgaccctggaagaaatattcctcaaggtggccgaagagagtggggtggatgctgagacctcagatggtaccttgccagcaagacgaaacaggcgggccttcggggacaagcagagctgtcttcgcccgttcactgaagatgatgctgctgatccaaatgattctgacatagacccagaatccagagagacagacttgctcagtgggatggatggcaaagggtcctaccaggtgaaaggctggaaacttacacagcaacagtttgtggcccttttgtggaagagactgctaattgccagacggagtcggaaaggattttttgctcagattgtcttgccagctgtgtttgtctgcattgcccttgtgttcagcctgatcgtgccaccctttggcaagtaccccagcctggaacttcagccctggatgtacaacgaacagtacacatttgtcagcaatgatgctcctgaggacacgggaaccctggaactcttaaacgccctcaccaaagaccctggcttcgggacccgctgtatggaaggaaacccaatcccagacacgccctgccaggcaggggaggaagagtggaccactgccccagttccccagaccatcatggacctcttccagaatgggaactggacaatgcagaacccttcacctgcatgccagtgtagcagcgacaaaatcaagaagatgctgcctgtgtgtcccccaggggcaggggggctgcctcctccacaaagaaaacaaaacactgcagatatccttcaggacctgacaggaagaaacatttcggattatctggtgaagacgtatgtgcagatcatagccaaaagcttaaagaacaagatctgggtgaatgagtttaggtatggcggcttttccctgggtgtcagtaatactcaagcacttcctccgagtcaagaagttaatgatgccaccaaacaaatgaagaaacacctaaagctggccaaggacagttctgcagatcgatttctcaacagcttgggaagatttatgacaggactggacaccagaaataatgtcaaggtgtggttcaataacaagggctggcatgcaatcagctctttcctgaatgtcatcaacaatgccattctccgggccaacctgcaaaagggagagaaccctagccattatggaattactgctttcaatcatcccctgaatctcaccaagcagcagctctcagaggtggctccgatgaccacatcagtggatgtccttgtgtccatctgtgtcatctttgcaatgtccttcgtcccagccagctttgtcgtattcctgatccaggagcgggtcagcaaagcaaaacacctgcagttcatcagtggagtgaagcctgtcatctactggctctctaattttgtctgggatatgtgcaattacgttgtccctgccacactggtcattatcatcttcatctgcttccagcagaagtcctatgtgtcctccaccaatctgcctgtgctagcccttctacttttgctgtatgggtggtcaatcacacctctcatgtacccagcctcctttgtgttcaagatccccagcacagcctatgtggtgctcaccagcgtgaacctcttcattggcattaatggcagcgtggccacctttgtgctggagctgttcaccgacaataagctgaataatatcaatgatatcctgaagtccgtgttcttgatcttcccacatttttgcctgggacgagggctcatcgacatggtgaaaaaccaggcaatggctgatgccctggaaaggtttggggagaatcgctttgtgtcaccattatcttgggacttggtgggacgaaacctcttcgccatggccgtggaaggggtggtgttcttcctcattactgttctgatccagtacagattcttcatcaggcccagacctgtaaatgcaaagctatctcctctgaatgatgaagatgaagatgtgaggcgggaaagacagagaattcttgatggtggaggccagaatgacatcttagaaatcaaggagttgacgaagatatatagaaggaagcggaagcctgctgttgacaggatttgcgtgggcattcctcctggtgagtgctttgggctcctgggagttaatggggctggaaaatcatcaactttcaagatgttaacaggagataccactgttaccagaggagatgctttccttaacagaaatagtatcttatcaaacatccatgaagtacatcagaacatgggctactgccctcagtttgatgccatcacagagctgttgactgggagagaacacgtggagttctttgcccttttgagaggagtcccagagaaagaagttggcaaggttggtgagtgggcgattcggaaactgggcctcgtgaagtatggagaaaaatatgctggtaactatagtggaggcaacaaacgcaagctctctacagccatggctttgatcggcgggcctcctgtggtgtttctggatgaacccaccacaggcatggatcccaaagcccggcggttcttgtggaattgtgccctaagtgttgtcaaggaggggagatcagtagtgcttacatctcatagtatggaagaatgtgaagctctttgcactaggatggcaatcatggtcaatggaaggttcaggtgccttggcagtgtccagcatctaaaaaataggtttggagatggttatacaatagttgtacgaatagcagggtccaacccggacctgaagcctgtccaggatttctttggacttgcatttcctggaagtgttccaaaagagaaacaccggaacatgctacaataccagcttccatcttcattatcttctctggccaggatattcagcatcctctcccagagcaaaaagcgactccacatagaagactactctgtttctcagacaacacttgaccaagtatttgtgaactttgccaaggaccaaagtgatgatgaccacttaaaagacctctcattacacaaaaaccagacagtagtggacgttgcagttctcacatcttttctacaggatgagaaagtgaaagaaagctatgtatgaagaatcctgttcatacggggtggctgaaagtaaagaggnactagactttcctttgcaccatgtgaagtgttgtggagaaaagagccagaagttgatgtgggaagaagtaaactggatactgtactgatactattcaatgcaatgcaattcaatgcaatgaaaacaaaattccattacaggggcagtgcctttgtagcctatgtcttgtatggctctcaagtgaaagacttgaatttagttttttacctatacctatgtgaaactctattatggaacccaatggacatatgggtttgaactcacactttttttttttttttgttcctgtgtattctcattggggttgcaacaataattcatcaagtaatcatggccagcgattattgatcaaaatcaaaaggtaatgcacatcctcattcactaagccatgccatgcccaggagactggtttcccggtgacacatccattgctggcaatgagtgtgccagagttattagtgccaagtttttcagaaagtttgaagcaccatggtgtgtcatgctcacttttgtgaaagctgctctgctcagagtctatcaacattgaatatcagttgacagaatggtgccatgcgtggctaacatcctgctttgattccctctgataagctgttctggtggcagtaacatgcaacaaaaatgtgggtgtctctaggcacgggaaacttggttccattgttatattgtcctatgcttcgagccatgggtctacagggtcatccttatgagactcttaaatatacttagatcctggtaagaggcaaagaatcaacagccaaactgctggggctgcaagctgctgaagccagggcatgggattaaagagattgtgcgttcaaacctagggaagcctgtgcccatttgtcctgactgtctgctaacatggtacactgcatctcaagatgtttatctgacacaagtgtattatttctggctttttgaattaatctagaaaatgaaaagatggagttgtattttgacaaaaatgtttgtactttttaatgttatttggaattttaagttctatcagtgacttctgaatccttagaatggcctctttgtagaaccctgtggtatagaggagtatggccactgccccactatttttattttcttatgtaagtttgcatatcagtcatgactagtgcctagaaagcaatgtgatggtcaggatctcatgacattatatttgagtttctttcagatcatttaggatactcttaatctcacttcatcaatcaaatattttttgagtgtatgctgtagctgaaagagtatgtacgtacgtataagactagagagatattaagtctcagtacacttcctgtgccatgttattcagctcactggtttacaaatataggttgtcttgtggttgtaggagcccactgtaacaatactgggcagcctttttttttttttttaattgcaacaatgcaaaagccaagaaagtataagggtcacaagtctaaacaatgaattcttcaacagggaaaacagctagcttgaaaacttgctgaaaaacacaacttgtgtttatggcatttagtaccttcaaataattggctttgcagatattggataccccattaaatctgacagtctcaaatttttcatctcttcaatcactagtcaagaaaaatataaaaacaacaaatacttccatatggagcatttttcagagttttctaacccagtcttatttttctagtcagtaaacatttgtaaaaatactgtttcactaatacttactgttaactgtcttgagagaaaagaaaaatatgagagaactattgtttggggaagttcaagtgatctttcaatatcattactaacttcttccactttttccaaaatttgaatattaacgctaaaggtgtaagacttcagatttcaaattaatctttctatattttttaaatttacagaatattatataacccactgctgaaaaagaaaaaaatgattgttttagaagttaaagtcaatattgattttaaatataagtaatgaaggcatatttccaataactagtgatatggcatcgttgcattttacagtatcttcaaaaatacagaatttatagaataatttctcctcatttaatatttttcaaaatcaaagttatggtttcctcattttactaaaatcgtattctaattcttcattatagtaaatctatgagcaactccttacttcggttcctctgatttcaaggccatattttaaaaaatcaaaaggcactgtgaactattttgaagaaaacacaacattttaatacagattgaaaggacctcttctgaagctagaaacaatctatagttatacatcttcattaatactgtgttaccttttaaaatagtaattttttacattttcctgtgtaaacctaattgtggtagaaatttttaccaactctatactcaatcaagcaaaatttctgtatattccctgtggaatgtacctatgtgagtttcagaaattctcaaaatacgtgttcaaaaatttctgcttttgcatctttgggacacctcagaaaacttattaacaactgtgaatatgagaaatacagaagaaaataataagccctctatacataaatgcccagcacaattcattgttaaaaaacaaccaaacctcacactactgtatttcattatctgtactgaaagcaaatgctttgtgactattaaatgttgcacatcattcattcaaaaaaaaaaaaaaaaaaa

SEQ ID NO: 94 - DNA, 9870 bp, Homo sapiens; identical to SEQ ID NO: 93
  modified_base (7138): a, t, c or g

SEQ ID NO: 95 - DNA, 9870 bp, Homo sapiens
  modified_base (7138): a, t, c or g
gtaattgcgagcgagagtgagtggggccgggacccgcagagccgagccgacccttctctcccgggctgcggcagggcagggcggggagctccgcgcaccaacagagccggttctcagggcgctttgctccttgttttttccccggttctgttttctccccttctccggaaggcttgtcaaggggtaggagaaagagacgcaaacacaaaagtggaaaacagttaatgaccagccacggcgtccctgctgtgagctctggccgctgccttccagggctcccgagccacacgctgggggtgctggctgagggaacatggcttgttggcctcagctgaggttgctgctgtggaagaacctcactttcagaagaagacaaacatgtcagctgctgctggaagtggcctggcctctatttatcttcctgatcctgatctctgttcggctgagctacccaccctatgaacaacatgaatgccattttccaaataaagccatgccctctgcaggaacacttccttgggttcaggggattatctgtaatgccaacaacccctgtttccgttacccgactcctggggaggctcccggagttgttggaaactttaacaaatccattgtggctcgcctgttctcagatgctcggaggcttcttttatacagccagaaagacaccagcatgaaggacatgcgcaaagttctgagaacattacagcagatcaagaaatccagctcaaacttgaagcttcaagatttcctggtggacaatgaaaccttctctgggttcctatatcacaacctctctctcccaaagtctactgtggacaagatgctgagggctgatgtcattctccacaaggtatttttgcaaggctaccagttacatttgacaagtctgtgcaatggatcaaaatcagaagagatgattcaacttggtgaccaagaagtttctgagctttgtggcctaccaagggagaaactggctgcagcagagcgagtacttcgttccaacatggacatcctgaagccaatcctgagaacactaaactctacatctcccttcccgagcaaggagctggccgaagccacaaaaacattgctgcatagtcttgggactctggcccaggagctgttcagcatgagaagctggagtgacatgcgacaggaggtgatgtttctgaccaatgtgaacagctccagctcctccacccaaatctaccaggctgtgtctcgtattgtctgcgggcatcccgagggaggggggctgaagatcaagtctctcaactggtatgaggacaacaactacaaagccctctttggaggcaatggcactgaggaagatgctgaaaccttctatgacaactctacaactccttactgcaatgatttgatgaagaatttggagtctagtcctctttcccgcattatctggaaagctctgaagccgctgctcgttgggaagatcctgtatacacctgacactccagccacaaggcaggtcatggctgaggtgaacaagaccttccaggaactggctgtgttccatgatctggaaggcatgtgggaggaactcagccccaagatctggaccttcatggagaacagccaagaaatggaccttgtccggatgctgttggacagcagggacaatgaccacttttgggaacagcagttggatggcttagattggacagcccaagacatcgtggcgtttttggccaagcacccagaggatgtccagtccagtaatggttctgtgtacacctggagagaagctttcaacgagactaaccaggcaatccggaccatatctcgcttcatggagtgtgtcaacctgaacaagctagaacccatagcaacagaagtctggctcatcaacaagtccatggagctgctggatgagaggaagttctgggctggtattgtgttcactggaattactccaggcagcattgagctgccccatcatgtcaagtacaagatccgaatggacattgacaatgtggagaggacaaataaaatcaaggatgggtactgggaccctggtcctcgagctgacccctttgaggacatgcggtacgtctgggggggcttcgcctacttgcaggatgtggtggagcaggcaatcatcagggtgctgacgggcaccgagaagaaaactggtgtctatatgcaacagatgccctatccctgttacgttgatgacatctttctgcgggtgatgagccggtcaatgcccctcttcatgacgctggcctggatttactcagtggctgtgatcatcaagggcatcgtgtatgagaaggaggcacggctgaaagagaccatgcggatcatgggcctggacaacagcatcctctggtttagctggttcattagtagcctcattcctcttcttgtgagcgctggcctgctagtggtcatcctgaagttaggaaacctgctgccctacagtgatcccagcgtggtgtttgtcttcctgtccgtgtttgctgtggtgacaatcctgcagtgcttcctgattagcacactcttctccagagccaacctggcagcagcctgtgggggcatcatctacttcacgctgtacctgccctacgtcctgtgtgtggcatggcaggactacgtgggcttcacactcaagatcttcgctagcctgctgtctcctgtggcttttgggtttggctgtgagtactttgccctttttgaggagcagggcattggagtgcagtgggacaacctgtttgagagtcctgtggaggaagatggcttcaatctcaccacttcggtctccatgatgctgtttgacaccttcctctatggggtgatgacctggtacattgaggctgtctttccaggccagtacggaattcccaggccctggtattttccttgcaccaagtcctactggtttggcgaggaaagtgatgagaagagccaccctggttccaaccagaagagaatatcagaaatctgcatggaggaggaacccacccacttgaagctgggcgtgtccattcagaacctggtaaaagtctaccgagatgggatgaaggtggctgtcgatggcctggcactgaatttttatgagggccagatcacctccttcctgggccacaatggagcggggaagacgaccaccatgtcaatcctgaccgggttgttccccccgacctcgggcaccgcctacatcctgggaaaagacattcgctctgagatgagcaccatccggcagaacctgggggtctgtccccagcataacgtgctgtttgacatgctgactgtcgaagaacacatctggttctatgcccgcttgaaagggctctctgagaagcacgtgaaggcggagatggagcagatggccctggatgttggtttgccatcaagcaagctgaaaagcaaaacaagccagctgtcaggtggaatgcagagaaagctatctgtggccttggcctttgtcgggggatctaaggttgtcattctggatgaacccacagctggtgtggacccttactcccgcaggggaatatgggagctgctgctgaaataccgacaaggccgcaccattattctctctacacaccacatggatgaagcggacgtcctgggggacaggattgccatcatctcccatgggaagctgtgctgtgtgggctcctccctgtttctgaagaaccagctgggaacaggctactacctgaccttggtcaagaaagatgtggaatcctccctcagttcctgcagaaacagtagtagcactgtgtcatacctgaaaaaggaggacagtgtttctcagagcagttctgatgctggcctgggcagcgaccatgagagtgacacgctgaccatcgatgtctctgctatctccaacctcatcaggaagcatgtgtctgaagcccggctggtggaagacatagggcatgagctgacctatgtgctgccatatgaagctgctaaggagggagcctttgtggaactctttcatgagattgatgaccggctctcagacctgggcatttctagttatggcatctcagagacgaccctggaagaaatattcctcaaggtggccgaagagagtggggtggatgctgagacctcagatggtaccttgccagcaagacgaaacaggcgggccttcggggacaagcagagctgtcttcgcccgttcactgaagatgatgctgctgatccaaatgattctgacatagacccagaatccagagagacagacttgctcagtgggatggatggcaaagggtcctaccaggtgaaaggctggaaacttacacagcaacagtttgtggcccttttgtggaagagactgctaattgccagacggagtcggaaaggattttttgctcagattgtcttgccagctgtgtttgtctgcattgcccttgtgttcagcctgatcgtgccaccctttggcaagtaccccagcctggaacttcagccctggatgtacaacgaacagtacacatttgtcagcaatgatgctcctgaggacacgggaaccctggaactcttaaacgccctcaccaaagaccctggcttcgggacccgctgtatggaaggaaacccaatcccagacacgccctgccaggcaggggaggaagagtggaccactgccccagttccccagaccatcatggacctcttccagaatgggaactggacaatgcagaacccttcacctgcatgccagtgtagcagcgacaaaatcaagaagatgctgcctgtgtgtcccccaggggcaggggggctgcctcctccacaaagaaaacaaaacactgcagatatccttcaggacctgacaggaagaaacatttcggattatctggtgaagacgtatgtgcagatcatagccaaaagcttaaagaacaagatctgggtgaatgagtttaggtatggcggcttttccctgggtgtcagtaatactcaagcacttcctccgagtcaagaagttaatgatgccaccaaacaaatgaagaaacacctaaagctggccaaggacagttctgcagatcgatttctcaacagcttgggaagatttatgacaggactggacaccagaaataatgtcaaggtgtggttcaataacaagggctggcatgcaatcagctctttcctgaatgtcatcaacaatgccattctccgggccaacctgcaaaagggagagaaccctagccattatggaattactgctttcaatcatcccctgaatctcaccaagcagcagctctcagaggtggctccgatgaccacatcagtggatgtccttgtgtccatctgtgtcatctttgcaatgtccttcgtcccagccagctttgtcgtattcctgatccaggagcgggtcagcaaagcaaaacacctgcagttcatcagtggagtgaagcctgtcatctactggctctctaattttgtctgggatatgtgcaattacgttgtccctgccacactggtcattatcatcttcatctgcttccagcagaagtcctatgtgtcctccaccaatctgcctgtgctagcccttctacttttgctgtatgggtggtcaatcacacctctcatgtacccagcctcctttgtgttcaagatccccagcacagcctatgtggtgctcaccagcgtgaacctcttcattggcattaatggcagcgtggccacctttgtgctggagctgttcaccgacaataagctgaataatatcaatgatatcctgaagtccgtgttcttgatcttcccacatttttgcctgggacgagggctcatcgacatggtgaaaaaccaggcaatggctgatgccctggaaaggtttggggagaatcgctttgtgtcaccattatcttgggacttggtgggacgaaacctcttcgccatggccgtggaaggggtggtgttcttcctcattactgttctgatccagtacagattcttcatcaggcccagacctgtaaatgcaaagctatctcctctgaatgatgaagatgaagatgtgaggcgggaaagacagagaattcttgatggtggaggccagaatgacatcttagaaatcaaggagttgacgaagatatatagaaggaagcggaagcctgctgttgacaggatttgcgtgggcattcctcctggtgagtgctttgggctcctgggagttaatggggctggaaaatcatcaactttcaagatgttaacaggagataccactgttaccagaggagatgctttccttaacagaaatagtatcttatcaaacatccatgaagtacatcagaacatgggctactgccctcagtttgatgccatcacagagctgttgactgggagagaacacgtggagttctttgcccttttgagaggagtcccagagaaagaagttggcaaggttggtgagtgggcgattcggaaactgggcctcgtgaagtatggagaaaaatatgctggtaactatagtggaggcaacaaacgcaagctctctacagccatggctttgatcggcgggcctcctgtggtgtttctggatgaacccaccacaggcatggatcccaaagcccggcggttcttgtggaattgtgccctaagtgttgtcaaggaggggagatcagtagtgcttacatctcatagtatggaagaatgtgaagctctttgcactaggatggcaatcatggtcaatggaaggttcaggtgccttggcagtgtccagcatctaaaaaataggtttggagatggttatacaatagttgtacgaatagcagggtccaacccggacctgaagcctgtccaggatttctttggacttgcatttcctggaagtgttccaaaagagaaacaccggaacatgctacaataccagcttccatcttcattatcttctctggccaggatattcagcatcctctcccagagcaaaaagcgactccacatagaagactactctgtttctcagacaacacttgaccaagtatttgtgaactttgccaaggaccaaagtgatgatgaccacttaaaagacctctcattacacaaaaaccagacagtagtggacgttgcagttctcacatcttttctacaggatgagaaagtgaaagaaagctatgtatgaagaatcctgttcatacggggtggctgaaagtaaagaggnactagactttcctttgcaccatgtgaagtgttgtggagaaaagagccagaagttgatgtgggaagaagtaaactggatactgtactgatactattcaatgcaatgcaattcaatgcaatgaaaacaaaattccattacaggggcagtgcctttgtagcctatgtcttgtatggctctcaagtgaaagacttgaatttagttttttacctatacctatgtgaaactctattatggaacccaatggacatatgggtttgaactcacactttttttttttttttgttcctgtgtattctcattggggttgcaacaataattcatcaagtaatcatggccagcgattattgatcaaaatcaaaaggtaatgcacatcctcattcactaagccatgccatgcccaggagactggtttcccggtgacacatccattgctggcaatgagtgtgccagagttattagtgccaagtttttcagaaagtttgaagcaccatggtgtgtcatgctcacttttgtgaaagctgctctgctcagagtctatcaacattgaatatcagttgacagaatggtgccatgcgtggctaacatcctgctttgattccctctgataagctgttctggtggcagtaacatgcaacaaaaatgtgggtgtctctaggcacgggaaacttggttccattgttatattgtcctatgcttcgagccatgggtctacagggtcatccttatgagactcttaaatatacttagatcctggtaagaggcaaagaatcaacagccaaactgctggggctgcaagctgctgaagccagggcatgggattaaagagattgtgcgttcaaacctagggaagcctgtgcccatttgtcctgactgtctgctaacatggtacactgcatctcaagatgtttatctgacacaagtgtattatttctggctttttgaattaatctagaaaatgaaaagatggagttgtattttgacaaaaatgtttgtactttttaatgttatttggaattttaagttctatcagtgacttctgaatccttagaatggcctctttgtagaaccctgtggtatagaggagtatggccactgccccactatttttattttcttatgtaagtttgcatatcagtcatgactagtgcctagaaagcaatgtgatggtcaggatctcatgacattatatttgagtttctttcagatcatttaggatactcttaatctcacttcatcaatcaaatattttttgagtgtatgctgtagctgaaagagtatgtacgtacgtataagactagagagatattaagtctcagtacacttcctgtgccatgttattcagctcactggtttacaaatataggttgtcttgtggttgtaggagcccactgtaacaatactgggcagcctttttttttttttttaattgcaacaatgcaaaagccaagaaagtataagggtcacaagtctaaacaatgaattcttcaacagggaaaacagctagcttgaaaacttgctgaaaaacacaacttgtgtttatggcatttagtaccttcaaataattggctttgcagatattggataccccattaaatctgacagtctcaaatttttcatctcttcaatcactagtcaagaaaaatataaaaacaacaaatacttccatatggagcatttttcagagttttctaacccagtcttatttttctagtcagtaaacatttgtaaaaatactgtttcactaatacttactgttaactgtcttgagagaaaagaaaaatatgagagaactattgtttggggaagttcaagtgatctttcaatatcattactaacttcttccactttttccaaaatttgaatattaacgctaaaggtgtaagacttcagatttcaaattaatctttctatattttttaaatttacagaatattatataacccactgctgaaaaagaaaaaaatgattgttttagaagttaaagtcaatattgattttaaatataagtaatgaaggcatatttccaataactagtgatatggcatcgttgcattttacagtatcttcaaaaatacagaatttatagaataatttctcctcatttaatatttttcaaaatcaaagttatggtttcctcattttactaaaatcgtattctaattcttcattatagtaaatctatgagcaactccttacttcggttcctctgatttcaaggccatattttaaaaaatcaaaaggcactgtgaactattttgaagaaaacacaacattttaatacagattgaaaggacctcttctgaagctagaaacaatctatagttatacatcttcattaatactgtgttaccttttaaaatagtaattttttacattttcctgtgtaaacctaattgtggtagaaatttttaccaactctatactcaatcaagcaaaatttctgtatattccctgtggaatgtacctatgtgagtttcagaaattctcaaaatacgtgttcaaaaatttctgcttttgcatctttgggacacctcagaaaacttattaacaactgtgaatatgagaaatacagaagaaaataataagccctctatacataaatgcccagcacaattcattgttaaaaaacaaccaaacctcacactactgtatttcattatctgtactgaaagcaaatgctttgtgactattaaatgttgcacatcattcattcaaaaaaaaaaaaaaaaaaa

SEQ ID NO: 96 - DNA, 9870 bp, Homo sapiens
  modified_base (7138): a, t, c or g
gtaattgcgagcgagagtgagtggggccgggacccgcagagccgagccgacccttctctcccgggctgcggcagggcagggcggggagctccgcgcaccaacagagccggttctcagggcgctttgctccttgttttttccccggttctgttttctccccttctccggaaggcttgtcaaggggtaggagaaagagacgcaaacacaaaagtggaaaacagttaatgaccagccacggcgtccctgctgtgagctctggccgctgccttccagggctcccgagccacacgctgggggtgctggctgagggaacatggcttgttggcctcagctgaggttgctgctgtggaagaacctcactttcagaagaagacaaacatgtcagctgctgctggaagtggcctggcctctatttatcttcctgatcctgatctctgttcggctgagctacccaccctatgaacaacatgaatgccattttccaaataaagccatgccctctgcaggaacacttccttgggttcaggggattatctgtaatgccaacaacccctgtttccgttacccgactcctggggaggctcccggagttgttggaaactttaacaaatccattgtggctcgcctgttctcagatgctcggaggcttcttttatacagccagaaagacaccagcatgaaggacatgcgcaaagttctgagaacattacagcagatcaagaaatccagctcaaacttgaagcttcaagatttcctggtggacaatgaaaccttctctgggttcctgtatcacaacctctctctcccaaagtctactgtggacaagatgctgagggctgatgtcattctccacaaggtatttttgcaaggctaccagttacatttgacaagtctgtgcaatggatcaaaatcagaagagatgattcaacttggtgaccaagaagtttctgagctttgtggcctgccaagggagaaactggctgcagcagagcgagtacttcgttccaacatggacatcctgaagccaatcctgagaacactaaactctacatctcccttcccgagcaaggagctggccgaagccacaaaaacattgctgcatagtcttgggactctggcccaggagctgttcagcatgagaagctggagtgacatgcgacaggaggtgatgtttctgaccaatgtgaacagctccagctcctccacccaaatctaccaggctgtgtctcgtattgtctgcgggcatcccgagggaggggggctgaagatcaagtctctcaactggtatgaggacaacaactacaaagccctctttggaggcaatggcactgaggaagatgctgaaaccttctatgacaactctacaactccttactgcaatgatttgatgaagaatttggagtctagtcctctttcccgcattatctggaaagctctgaagccgctgctcgttgggaagatcctgtatacacctgacactccagccacaaggcaggtcatggctgaggtgaacaagaccttccaggaactggctgtgttccatgatctggaaggcatgtgggaggaactcagccccaagatctggaccttcatggagaacagccaagaaatggaccttgtccggatgctgttggacagcagggacaatgaccacttttgggaacagcagttggatggcttagattggacagcccaagacatcgtggcgtttttggccaagcacccagaggatgtccagtccagtaatggttctgtgtacacctggagagaagctttcaacgagactaaccaggcaatccggaccatatctcgcttcatggagtgtgtcaacctgaacaagctagaacccatagcaacagaagtctggctcatcaacaagtccatggagctgctggatgagaggaagttctgggctggtattgtgttcactggaattactccaggcagcattgagctgccccatcatgtcaagtacaagatccgaatggacattgacaatgtggagaggacaaataaaatcaaggatgggtactgggaccctggtcctcgagctgacccctttgaggacatgcggtacgtctgggggggcttcgcctacttgcaggatgtggtggagcaggcaatcatcagggtgctgacgggcaccgagaagaaaactggtgtctatatgcaacagatgccctatccctgttacgttgatgacatctttctgcgggtgatgagccggtcaatgcccctcttcatgacgctggcctggatttactcagtggctgtgatcatcaagggcatcgtgtatgagaaggaggcacggctgaaagagaccatgcggatcatgggcctggacaacagcatcctctggtttagctggttcattagtagcctcattcctcttcttgtgagcgctggcctgctagtggtcatcctgaagttaggaaacctgctgccctacagtgatcccagcgtggtgtttgtcttcctgtccgtgtttgctgtggtgacaatcctgcagtgcttcctgattagcacactcttctccagagccaacctggcagcagcctgtgggggcatcatctacttcacgctgtacctgccctacgtcctgtgtgtggcatggcaggactacgtgggcttcacactcaagatcttcgctagcctgctgtctcctgtggcttttgggtttggctgtgagtactttgccctttttgaggagcagggcattggagtgcagtgggacaacctgtttgagagtcctgtggaggaagatggcttcaatctcaccacttcggtctccatgatgctgtttgacaccttcctctatggggtgatgacctggtacattgaggctgtctttccaggccagtacggaattcccaggccctggtattttccttgcaccaagtcctactggtttggcgaggaaagtgatgagaagagccaccctggttccaaccagaagagaatatcagaaatctgcatggaggaggaacccacccacttgaagctgggcgtgtccattcagaacctggtaaaagtctaccgagatgggatgaaggtggctgtcgatggcctggcactgaatttttatgagggccagatcacctccttcctgggccacaatggagcggggaagacgaccaccatgtcaatcctgaccgggttgttccccccgacctcgggcaccgcctacatcctgggaaaagacattcgctctgagatgagcaccatccggcagaacctgggggtctgtccccagcataacgtgctgtttgacatgctgactgtcgaagaacacatctggttctatgcccgcttgaaagggctctctgagaagcacgtgaaggcggagatggagcagatggccctggatgttggtttgccatcaagcaagctgaaaagcaaaacaagccagctgtcaggtggaatgcagagaaagctatctgtggccttggcctttgtcgggggatctaaggttgtcattctggatgaacccacagctggtgtggacccttactcccgcaggggaatatgggagctgctgctgaaataccgacaaggccgcaccattattctctctacacaccacatggatgaagcggacgtcctgggggacaggattgccatcatctcccatgggaagctgtgctgtgtgggctcctccctgtttctgaagaaccagctgggaacaggctactacctgaccttggtcaagaaagatgtggaatcctccctcagttcctgcagaaacagtagtagcactgtgtcatacctgaaaaaggaggacagtgtttctcagagcagttctgatgctggcctgggcagcgaccatgagagtgacacgctgaccatcgatgtctctgctatctccaacctcatcaggaagcatgtgtctgaagcccggctggtggaagacatagggcatgagctgacctatgtgctgccatatgaagctgctaaggagggagcctttgtggaactctttcatgagattgatgaccggctctcagacctgggcatttctagttatggcatctcagagacgaccctggaagaaatattcctcaaggtggccgaagagagtggggtggatgctgagacctcagatggtaccttgccagcaagacgaaacaggcgggccttcggggacaagcagagctgtcttcgcccgttcactgaagatgatgctgctgatccaaatgattctgacatagacccagaatccagagagacagacttgctcagtgggatggatggcaaagggtcctaccaggtgaaaggctggaaacttacacagcaacagtttgtggcccttttgtggaagagactgctaattgccagacggagtcggaaaggattttttgctcagattgtcttgccagctgtgtttgtctgcattgcccttgtgttcagcctgatcgtgccaccctttggcaagtaccccagcctggaacttcagccctggatgtacaacgaacagtacacatttgtcagcaatgatgctcctgaggacacgggaaccctggaactcttaaacgccctcaccaaagaccctggcttcgggacccgctgtatggaaggaaacccaatcccagacacgccctgccaggcaggggaggaagagtggaccactgccccagttccccagaccatcatggacctcttccagaatgggaactggacaatgcagaacccttcacctgcatgccagtgtagcagcgacaaaatcaagaagatgctgcctgtgtgtcccccaggggcaggggggctgcctcctccacaaagaaaacaaaacactgcagatatccttcaggacctgacaggaagaaacatttcggattatctggtgaagacgtatgtgcagatcatagccaaaagcttaaagaacaagatctgggtgaatgagtttaggtatggcggcttttccctgggtgtcagtaatactcaagcacttcctccgagtcaagaagttaatgatgccaccaaacaaatgaagaaacacctaaagctggccaaggacagttctgcagatcgatttctcaacagcttgggaagatttatgacaggactggacaccagaaataatgtcaaggtgtggttcaataacaagggctggcatgcaatcagctctttcctgaatgtcatcaacaatgccattctccgggccaacctgcaaaagggagagaaccctagccattatggaattactgctttcaatcatcccctgaatctcaccaagcagcagctctcagaggtggctccgatgaccacatcagtggatgtccttgtgtccatctgtgtcatctttgcaatgtccttcgtcccagccagctttgtcgtattcctgatccaggagcgggtcagcaaagcaaaacacctgcagttcatcagtggagtgaagcctgtcatctactggctctctaattttgtctgggatatgtgcaattacgttgtccctgccacactggtcattatcatcttcatctgcttccagcagaagtcctatgtgtcctccaccaatctgcctgtgctagcccttctacttttgctgtatgggtggtcaatcacacctctcatgtacccagcctcctttgtgttcaagatccccagcacagcctatgtggtgctcaccagcgtgaacctcttcattggcattaatggcagcgtggccacctttgtgctggagctgttcaccgacaataagctgaataatatcaatgatatcctgaagtccgtgttcttgatcttcccacatttttgcctgggacgagggctcatcgacatggtgaaaaaccaggcaatggctgatgccctggaaaggtttggggagaatcgctttgtgtcaccattatcttgggacttggtgggacgaaacctcttcgccatggccgtggaaggggtggtgttcttcctcattactgttctgatccagtacagattcttcatcaggcccagacctgtaaatgcaaagctatctcctctgaatgatgaagatgaagatgtgaggcgggaaagacagagaattcttgatggtggaggccagaatgacatcttagaaatcaaggagttgacgaagatatatagaaggaagcggaagcctgctgttgacaggatttgcgtgggcattcctcctggtgagtgctttgggctcctgggagttaatggggctggaaaatcatcaactttcaagatgttaacaggagataccactgttaccagaggagatgctttccttaacagaaatagtatcttatcaaacatccatgaagtacatcagaacatgggctactgccctcagtttgatgccatcacagagctgttgactgggagagaacacgtggagttctttgcccttttgagaggagtcccagagaaagaagttggcaaggttggtgagtgggcgattcggaaactgggcctcgtgaagtatggagaaaaatatgctggtaactatagtggaggcaacaaacgcaagctctctacagccatggctttgatcggcgggcctcctgtggtgtttctggatgaacccaccacaggcatggatcccaaagcccggcggttcttgtggaattgtgccctaagtgttgtcaaggaggggagatcagtagtgcttacatctcatagtatggaagaatgtgaagctctttgcactaggatggcaatcatggtcaatggaaggttcaggtgccttggcagtgtccagcatctaaaaaataggtttggagatggttatacaatagttgtacgaatagcagggtccaacccggacctgaagcctgtccaggatttctttggacttgcatttcctggaagtgttccaaaagagaaacaccggaacatgctacaataccagcttccatcttcattatcttctctggccaggatattcagcatcctctcccagagcaaaaagcgactccacatagaagactactctgtttctcagacaacacttgaccaagtatttgtgaactttgccaaggaccaaagtgatgatgaccacttaaaagacctctcattacacaaaaaccagacagtagtggacgttgcagttctcacatcttttctacaggatgagaaagtgaaagaaagctatgtatgaagaatcctgttcatacggggtggctgaaagtaaagaggnactagactttcctttgcaccatgtgaagtgttgtggagaaaagagccagaagttgatgtgggaagaagtaaactggatactgtactgatactattcaatgcaatgcaattcaatgcaatgaaaacaaaattccattacaggggcagtgcctttgtagcctatgtcttgtatggctctcaagtgaaagacttgaatttagttttttacctatacctatgtgaaactctattatggaacccaatggacatatgggtttgaactcacactttttttttttttttgttcctgtgtattctcattggggttgcaacaataattcatcaagtaatcatggccagcgattattgatcaaaatcaaaaggtaatgcacatcctcattcactaagccatgccatgcccaggagactggtttcccggtgacacatccattgctggcaatgagtgtgccagagttattagtgccaagtttttcagaaagtttgaagcaccatggtgtgtcatgctcacttttgtgaaagctgctctgctcagagtctatcaacattgaatatcagttgacagaatggtgccatgcgtggctaacatcctgctttgattccctctgataagctgttctggtggcagtaacatgcaacaaaaatgtgggtgtctctaggcacgggaaacttggttccattgttatattgtcctatgcttcgagccatgggtctacagggtcatccttatgagactcttaaatatacttagatcctggtaagaggcaaagaatcaacagccaaactgctggggctgcaagctgctgaagccagggcatgggattaaagagattgtgcgttcaaacctagggaagcctgtgcccatttgtcctgactgtctgctaacatggtacactgcatctcaagatgtttatctgacacaagtgtattatttctggctttttgaattaatctagaaaatgaaaagatggagttgtattttgacaaaaatgtttgtactttttaatgttatttggaattttaagttctatcagtgacttctgaatccttagaatggcctctttgtagaaccctgtggtatagaggagtatggccactgccccactatttttattttcttatgtaagtttgcatatcagtcatgactagtgcctagaaagcaatgtgatggtcaggatctcatgacattatatttgagtttctttcagatcatttaggatactcttaatctcacttcatcaatcaaatattttttgagtgtatgctgtagctgaaagagtatgtacgtacgtataagactagagagatattaagtctcagtacacttcctgtgccatgttattcagctcactggtttacaaatataggttgtcttgtggttgtaggagcccactgtaacaatactgggcagcctttttttttttttttaattgcaacaatgcaaaagccaagaaagtataagggtcacaagtctaaacaatgaattcttcaacagggaaaacagctagcttgaaaacttgctgaaaaacacaacttgtgtttatggcatttagtaccttcaaataattggctttgcagatattggataccccattaaatctgacagtctcaaatttttcatctcttcaatcactagtcaagaaaaatataaaaacaacaaatacttccatatggagcatttttcagagttttctaacccagtcttatttttctagtcagtaaacatttgtaaaaatactgtttcactaatacttactgttaactgtcttgagagaaaagaaaaatatgagagaactattgtttggggaagttcaagtgatctttcaatatcattactaacttcttccactttttccaaaatttgaatattaacgctaaaggtgtaagacttcagatttcaaattaatctttctatattttttaaatttacagaatattatataacccactgctgaaaaagaaaaaaatgattgttttagaagttaaagtcaatattgattttaaatataagtaatgaaggcatatttccaataactagtgatatggcatcgttgcattttacagtatcttcaaaaatacagaatttatagaataatttctcctcatttaatatttttcaaaatcaaagttatggtttcctcattttactaaaatcgtattctaattcttcattatagtaaatctatgagcaactccttacttcggttcctctgatttcaaggccatattttaaaaaatcaaaaggcactgtgaactattttgaagaaaacacaacattttaatacagattgaaaggacctcttctgaagctagaaacaatctatagttatacatcttcattaatactgtgttaccttttaaaatagtaattttttacattttcctgtgtaaacctaattgtggtagaaatttttaccaactctatactcaatcaagcaaaatttctgtatattccctgtggaatgtacctatgtgagtttcagaaattctcaaaatacgtgttcaaaaatttctgcttttgcatctttgggacacctcagaaaacttattaacaactgtgaatatgagaaatacagaagaaaataataagccctctatacataaatgcccagcacaattcattgttaaaaaacaaccaaacctcacactactgtatttcattatctgtactgaaagcaaatgctttgtgactattaaatgttgcacatcattcattcaaaaaaaaaaaaaaaaaaa

SEQ ID NO: 97 - DNA, 9870 bp, Homo sapiens
  modified_base (7138): a, t, c or g
gtaattgcgagcgagagtgagtggggccgggacccgcagagccgagccgacccttctctcccgggctgcggcagggcagggcggggagctccgcgcaccaacagagccggttctcagggcgctttgctccttgttttttccccggttctgttttctccccttctccggaaggcttgtcaaggggtaggagaaagagacgcaaacacaaaagtggaaaacagttaatgaccagccacggcgtccctgctgtgagctctggccgctgccttccagggctcccgagccacacgctgggggtgctggctgagggaacatggcttgttggcctcagctgaggttgctgctgtggaagaacctcactttcagaagaagacaaacatgtcagctgctgctggaagtggcctggcctctatttatcttcctgatcctgatctctgttcggctgagctacccaccctatgaacaacatgaatgccattttccaaataaagccatgccctctgcaggaacacttccttgggttcaggggattatctgtaatgccaacaacccctgtttccgttacccgactcctggggaggctcccggagttgttggaaactttaacaaatccattgtggctcgcctgttctcagatgctcggaggcttcttttatacagccagaaagacaccagcatgaaggacatgcgcaaagttctgagaacattacagcagatcaagaaatccagctcaaacttgaagcttcaagatttcctggtggacaatgaaaccttctctgggttcctgtatcacaacctctctctcccaaagtctactgtggacaagatgctgagggctgatgtcattctccacaaggtatttttgcaaggctaccagttacatttgacaagtctgtgcaatggatcaaaatcagaagagatgattcaacttggtgaccaagaagtttctgagctttgtggcctaccaaaggagaaactggctgcagcagagcgagtacttcgttccaacatggacatcctgaagccaatcctgagaacactaaactctacatctcccttcccgagcaaggagctggccgaagccacaaaaacattgctgcatagtcttgggactctggcccaggagctgttcagcatgagaagctggagtgacatgcgacaggaggtgatgtttctgaccaatgtgaacagctccagctcctccacccaaatctaccaggctgtgtctcgtattgtctgcgggcatcccgagggaggggggctgaagatcaagtctctcaactggtatgaggacaacaactacaaagccctctttggaggcaatggcactgaggaagatgctgaaaccttctatgacaactctacaactccttactgcaatgatttgatgaagaatttggagtctagtcctctttcccgcattatctggaaagctctgaagccgctgctcgttgggaagatcctgtatacacctgacactccagccacaaggcaggtcatggctgaggtgaacaagaccttccaggaactggctgtgttccatgatctggaaggcatgtgggaggaactcagccccaagatctggaccttcatggagaacagccaagaaatggaccttgtccggatgctgttggacagcagggacaatgaccacttttgggaacagcagttggatggcttagattggacagcccaagacatcgtggcgtttttggccaagcacccagaggatgtccagtccagtaatggttctgtgtacacctggagagaagctttcaacgagactaaccaggcaatccggaccatatctcgcttcatggagtgtgtcaacctgaacaagctagaacccatagcaacagaagtctggctcatcaacaagtccatggagctgctggatgagaggaagttctgggctggtattgtgttcactggaattactccaggcagcattgagctgccccatcatgtcaagtacaagatccgaatggacattgacaatgtggagaggacaaataaaatcaaggatgggtactgggaccctggtcctcgagctgacccctttgaggacatgcggtacgtctgggggggcttcgcctacttgcaggatgtggtggagcaggcaatcatcagggtgctgacgggcaccgagaagaaaactggtgtctatatgcaacagatgccctatccctgttacgttgatgacatctttctgcgggtgatgagccggtcaatgcccctcttcatgacgctggcctggatttactcagtggctgtgatcatcaagggcatcgtgtatgagaaggaggcacggctgaaagagaccatgcggatcatgggcctggacaacagcatcctctggtttagctggttcattagtagcctcattcctcttcttgtgagcgctggcctgctagtggtcatcctgaagttaggaaacctgctgccctacagtgatcccagcgtggtgtttgtcttcctgtccgtgtttgctgtggtgacaatcctgcagtgcttcctgattagcacactcttctccagagccaacctggcagcagcctgtgggggcatcatctacttcacgctgtacctgccctacgtcctgtgtgtggcatggcaggactacgtgggcttcacactcaagatcttcgctagcctgctgtctcctgtggcttttgggtttggctgtgagtactttgccctttttgaggagcagggcattggagtgcagtgggacaacctgtttgagagtcctgtggaggaagatggcttcaatctcaccacttcggtctccatgatgctgtttgacaccttcctctatggggtgatgacctggtacattgaggctgtctttccaggccagtacggaattcccaggccctggtattttccttgcaccaagtcctactggtttggcgaggaaagtgatgagaagagccaccctggttccaaccagaagagaatatcagaaatctgcatggaggaggaacccacccacttgaagctgggcgtgtccattcagaacctggtaaaagtctaccgagatgggatgaaggtggctgtcgatggcctggcactgaatttttatgagggccagatcacctccttcctgggccacaatggagcggggaagacgaccaccatgtcaatcctgaccgggttgttccccccgacctcgggcaccgcctacatcctgggaaaagacattcgctctgagatgagcaccatccggcagaacctgggggtctgtccccagcataacgtgctgtttgacatgctgactgtcgaagaacacatctggttctatgcccgcttgaaagggctctctgagaagcacgtgaaggcggagatggagcagatggccctggatgttggtttgccatcaagcaagctgaaaagcaaaacaagccagctgtcaggtggaatgcagagaaagctatctgtggccttggcctttgtcgggggatctaaggttgtcattctggatgaacccacagctggtgtggacccttactcccgcaggggaatatgggagctgctgctgaaataccgacaaggccgcaccattattctctctacacaccacatggatgaagcggacgtcctgggggacaggattgccatcatctcccatgggaagctgtgctgtgtgggctcctccctgtttctgaagaaccagctgggaacaggctactacctgaccttggtcaagaaagatgtggaatcctccctcagttcctgcagaaacagtagtagcactgtgtcatacctgaaaaaggaggacagtgtttctcagagcagttctgatgctggcctgggcagcgaccatgagagtgacacgctgaccatcgatgtctctgctatctccaacctcatcaggaagcatgtgtctgaagcccggctggtggaagacatagggcatgagctgacctatgtgctgccatatgaagctgctaaggagggagcctttgtggaactctttcatgagattgatgaccggctctcagacctgggcatttctagttatggcatctcagagacgaccctggaagaaatattcctcaaggtggccgaagagagtggggtggatgctgagacctcagatggtaccttgccagcaagacgaaacaggcgggccttcggggacaagcagagctgtcttcgcccgttcactgaagatgatgctgctgatccaaatgattctgacatagacccagaatccagagagacagacttgctcagtgggatggatggcaaagggtcctaccaggtgaaaggctggaaacttacacagcaacagtttgtggcccttttgtggaagagactgctaattgccagacggagtcggaaaggattttttgctcagattgtcttgccagctgtgtttgtctgcattgcccttgtgttcagcctgatcgtgccaccctttggcaagtaccccagcctggaacttcagccctggatgtacaacgaacagtacacatttgtcagcaatgatgctcctgaggacacgggaaccctggaactcttaaacgccctcaccaaagaccctggcttcgggacccgctgtatggaaggaaacccaatcccagacacgccctgccaggcaggggaggaagagtggaccactgccccagttccccagaccatcatggacctcttccagaatgggaactggacaatgcagaacccttcacctgcatgccagtgtagcagcgacaaaatcaagaagatgctgcctgtgtgtcccccaggggcaggggggctgcctcctccacaaagaaaacaaaacactgcagatatccttcaggacctgacaggaagaaacatttcggattatctggtgaagacgtatgtgcagatcatagccaaaagcttaaagaacaagatctgggtgaatgagtttaggtatggcggcttttccctgggtgtcagtaatactcaagcacttcctccgagtcaagaagttaatgatgccaccaaacaaatgaagaaacacctaaagctggccaaggacagttctgcagatcgatttctcaacagcttgggaagatttatgacaggactggacaccagaaataatgtcaaggtgtggttcaataacaagggctggcatgcaatcagctctttcctgaatgtcatcaacaatgccattctccgggccaacctgcaaaagggagagaaccctagccattatggaattactgctttcaatcatcccctgaatctcaccaagcagcagctctcagaggtggctccgatgaccacatcagtggatgtccttgtgtccatctgtgtcatctttgcaatgtccttcgtcccagccagctttgtcgtattcctgatccaggagcgggtcagcaaagcaaaacacctgcagttcatcagtggagtgaagcctgtcatctactggctctctaattttgtctgggatatgtgcaattacgttgtccctgccacactggtcattatcatcttcatctgcttccagcagaagtcctatgtgtcctccaccaatctgcctgtgctagcccttctacttttgctgtatgggtggtcaatcacacctctcatgtacccagcctcctttgtgttcaagatccccagcacagcctatgtggtgctcaccagcgtgaacctcttcattggcattaatggcagcgtggccacctttgtgctggagctgttcaccgacaataagctgaataatatcaatgatatcctgaagtccgtgttcttgatcttcccacatttttgcctgggacgagggctcatcgacatggtgaaaaaccaggcaatggctgatgccctggaaaggtttggggagaatcgctttgtgtcaccattatcttgggacttggtgggacgaaacctcttcgccatggccgtggaaggggtggtgttcttcctcattactgttctgatccagtacagattcttcatcaggcccagacctgtaaatgcaaagctatctcctctgaatgatgaagatgaagatgtgaggcgggaaagacagagaattcttgatggtggaggccagaatgacatcttagaaatcaaggagttgacgaagatatatagaaggaagcggaagcctgctgttgacaggatttgcgtgggcattcctcctggtgagtgctttgggctcctgggagttaatggggctggaaaatcatcaactttcaagatgttaacaggagataccactgttaccagaggagatgctttccttaacagaaatagtatcttatcaaacatccatgaagtacatcagaacatgggctactgccctcagtttgatgccatcacagagctgttgactgggagagaacacgtggagttctttgcccttttgagaggagtcccagagaaagaagttggcaaggttggtgagtgggcgattcggaaactgggcctcgtgaagtatggagaaaaatatgctggtaactatagtggaggcaacaaacgcaagctctctacagccatggctttgatcggcgggcctcctgtggtgtttctggatgaacccaccacaggcatggatcccaaagcccggcggttcttgtggaattgtgccctaagtgttgtcaaggaggggagatcagtagtgcttacatctcatagtatggaagaatgtgaagctctttgcactaggatggcaatcatggtcaatggaaggttcaggtgccttggcagtgtccagcatctaaaaaataggtttggagatggttatacaatagttgtacgaatagcagggtccaacccggacctgaagcctgtccaggatttctttggacttgcatttcctggaagtgttccaaaagagaaacaccggaacatgctacaataccagcttccatcttcattatcttctctggccaggatattcagcatcctctcccagagcaaaaagcgactccacatagaagactactctgtttctcagacaacacttgaccaagtatttgtgaactttgccaaggaccaaagtgatgatgaccacttaaaagacctctcattacacaaaaaccagacagtagtggacgttgcagttctcacatcttttctacaggatgagaaagtgaaagaaagctatgtatgaagaatcctgttcatacggggtggctgaaagtaaagaggnactagactttcctttgcaccatgtgaagtgttgtggagaaaagagccagaagttgatgtgggaagaagtaaactggatactgtactgatactattcaatgcaatgcaattcaatgcaatgaaaacaaaattccattacaggggcagtgcctttgtagcctatgtcttgtatggctctcaagtgaaagacttgaatttagttttttacctatacctatgtgaaactctattatggaacccaatggacatatgggtttgaactcacactttttttttttttttgttcctgtgtattctcattggggttgcaacaataattcatcaagtaatcatggccagcgattattgatcaaaatcaaaaggtaatgcacatcctcattcactaagccatgccatgcccaggagactggtttcccggtgacacatccattgctggcaatgagtgtgccagagttattagtgccaagtttttcagaaagtttgaagcaccatggtgtgtcatgctcacttttgtgaaagctgctctgctcagagtctatcaacattgaatatcagttgacagaatggtgccatgcgtggctaacatcctgctttgattccctctgataagctgttctggtggcagtaacatgcaacaaaaatgtgggtgtctctaggcacgggaaacttggttccattgttatattgtcctatgcttcgagccatgggtctacagggtcatccttatgagactcttaaatatacttagatcctggtaagaggcaaagaatcaacagccaaactgctggggctgcaagctgctgaagccagggcatgggattaaagagattgtgcgttcaaacctagggaagcctgtgcccatttgtcctgactgtctgctaacatggtacactgcatctcaagatgtttatctgacacaagtgtattatttctggctttttgaattaatctagaaaatgaaaagatggagttgtattttgacaaaaatgtttgtactttttaatgttatttggaattttaagttctatcagtgacttctgaatccttagaatggcctctttgtagaaccctgtggtatagaggagtatggccactgccccactatttttattttcttatgtaagtttgcatatcagtcatgactagtgcctagaaagcaatgtgatggtcaggatctcatgacattatatttgagtttctttcagatcatttaggatactcttaatctcacttcatcaatcaaatattttttgagtgtatgctgtagctgaaagagtatgtacgtacgtataagactagagagatattaagtctcagtacacttcctgtgccatgttattcagctcactggtttacaaatataggttgtcttgtggttgtaggagcccactgtaacaatactgggcagcctttttttttttttttaattgcaacaatgcaaaagccaagaaagtataagggtcacaagtctaaacaatgaattcttcaacagggaaaacagctagcttgaaaacttgctgaaaaacacaacttgtgtttatggcatttagtaccttcaaataattggctttgcagatattggataccccattaaatctgacagtctcaaatttttcatctcttcaatcactagtcaagaaaaatataaaaacaacaaatacttccatatggagcatttttcagagttttctaacccagtcttatttttctagtcagtaaacatttgtaaaaatactgtttcactaatacttactgttaactgtcttgagagaaaagaaaaatatgagagaactattgtttggggaagttcaagtgatctttcaatatcattactaacttcttccactttttccaaaatttgaatattaacgctaaaggtgtaagacttcagatttcaaattaatctttctatattttttaaatttacagaatattatataacccactgctgaaaaagaaaaaaatgattgttttagaagttaaagtcaatattgattttaaatataagtaatgaaggcatatttccaataactagtgatatggcatcgttgcattttacagtatcttcaaaaatacagaatttatagaataatttctcctcatttaatatttttcaaaatcaaagttatggtttcctcattttactaaaatcgtattctaattcttcattatagtaaatctatgagcaactccttacttcggttcctctgatttcaaggccatattttaaaaaatcaaaaggcactgtgaactattttgaagaaaacacaacattttaatacagattgaaaggacctcttctgaagctagaaacaatctatagttatacatcttcattaatactgtgttaccttttaaaatagtaattttttacattttcctgtgtaaacctaattgtggtagaaatttttaccaactctatactcaatcaagcaaaatttctgtatattccctgtggaatgtacctatgtgagtttcagaaattctcaaaatacgtgttcaaaaatttctgcttttgcatctttgggacacctcagaaaacttattaacaactgtgaatatgagaaatacagaagaaaataataagccctctatacataaatgcccagcacaattcattgttaaaaaacaaccaaacctcacactactgtatttcattatctgtactgaaagcaaatgctttgtgactattaaatgttgcacatcattcattcaaaaaaaaaaaaaaaaaaa

SEQ ID NO: 98 - DNA, 9870 bp, Homo sapiens
  modified_base (7138): a, t, c or g
gtaattgcgagcgagagtgagtggggccgggacccgcagagccgagccgacccttctctcccgggctgcggcagggcagggcggggagctccgcgcaccaacagagccggttctcagggcgctttgctccttgttttttccccggttctgttttctccccttctccggaaggcttgtcaaggggtaggagaaagagacgcaaacacaaaagtggaaaacagttaatgaccagccacggcgtccctgctgtgagctctggccgctgccttccagggctcccgagccacacgctgggggtgctggctgagggaacatggcttgttggcctcagctgaggttgctgctgtggaagaacctcactttcagaagaagacaaacatgtcagctgctgctggaagtggcctggcctctatttatcttcctgatcctgatctctgttcggctgagctacccaccctatgaacaacatgaatgccattttccaaataaagccatgccctctgcaggaacacttccttgggttcaggggattatctgtaatgccaacaacccctgtttccgttacccgactcctggggaggctcccggagttgttggaaactttaacaaatccattgtggctcgcctgttctcagatgctcggaggcttcttttatacagccagaaagacaccagcatgaaggacatgcgcaaagttctgagaacattacagcagatcaagaaatccagctcaaacttgaagcttcaagatttcctggtggacaatgaaaccttctctgggttcctgtatcacaacctctctctcccaaagtctactgtggacaagatgctgagggctgatgtcattctccacaaggtatttttgcaaggctaccagttacatttgacaagtctgtgcaatggatcaaaatcagaagagatgattcaacttggtgaccaagaagtttctgagctttgtggcctaccaagggagaaactggctgcagcagagcgagtacttcgttccaacatggacatcctgaagccaatcctgagaacactaaactctacatctcccttcccgagcaaggagctggccgaagccacaaaaacattgctgcatagtcttgggactctggcccaggagctgttcagcatgagaagctggagtgacatgcgacaggaggtgatgtttctgaccaatgtgaacagctccagctcctccacccaaatctaccaggctgtgtctcgtattgtctgcgggcatcctgagggaggggggctgaagatcaagtctctcaactggtatgaggacaacaactacaaagccctctttggaggcaatggcactgaggaagatgctgaaaccttctatgacaactctacaactccttactgcaatgatttgatgaagaatttggagtctagtcctctttcccgcattatctggaaagctctgaagccgctgctcgttgggaagatcctgtatacacctgacactccagccacaaggcaggtcatggctgaggtgaacaagaccttccaggaactggctgtgttccatgatctggaaggcatgtgggaggaactcagccccaagatctggaccttcatggagaacagccaagaaatggaccttgtccggatgctgttggacagcagggacaatgaccacttttgggaacagcagttggatggcttagattggacagcccaagacatcgtggcgtttttggccaagcacccagaggatgtccagtccagtaatggttctgtgtacacctggagagaagctttcaacgagactaaccaggcaatccggaccatatctcgcttcatggagtgtgtcaacctgaacaagctagaacccatagcaacagaagtctggctcatcaacaagtccatggagctgctggatgagaggaagttctgggctggtattgtgttcactggaattactccaggcagcattgagctgccccatcatgtcaagtacaagatccgaatggacattgacaatgtggagaggacaaataaaatcaaggatgggtactgggaccctggtcctcgagctgacccctttgaggacatgcggtacgtctgggggggcttcgcctacttgcaggatgtggtggagcaggcaatcatcagggtgctgacgggcaccgagaagaaaactggtgtctatatgcaacagatgccctatccctgttacgttgatgacatctttctgcgggtgatgagccggtcaatgcccctcttcatgacgctggcctggatttactcagtggctgtgatcatcaagggcatcgtgtatgagaaggaggcacggctgaaagagaccatgcggatcatgggcctggacaacagcatcctctggtttagctggttcattagtagcctcattcctcttcttgtgagcgctggcctgctagtggtcatcctgaagttaggaaacctgctgccctacagtgatcccagcgtggtgtttgtcttcctgtccgtgtttgctgtggtgacaatcctgcagtgcttcctgattagcacactcttctccagagccaacctggcagcagcctgtgggggcatcatctacttcacgctgtacctgccctacgtcctgtgtgtggcatggcaggactacgtgggcttcacactcaagatcttcgctagcctgctgtctcctgtggcttttgggtttggctgtgagtactttgccctttttgaggagcagggcattggagtgcagtgggacaacctgtttgagagtcctgtggaggaagatggcttcaatctcaccacttcggtctccatgatgctgtttgacaccttcctctatggggtgatgacctggtacattgaggctgtctttccaggccagtacggaattcccaggccctggtattttccttgcaccaagtcctactggtttggcgaggaaagtgatgagaagagccaccctggttccaaccagaagagaatatcagaaatctgcatggaggaggaacccacccacttgaagctgggcgtgtccattcagaacctggtaaaagtctaccgagatgggatgaaggtggctgtcgatggcctggcactgaatttttatgagggccagatcacctccttcctgggccacaatggagcggggaagacgaccaccatgtcaatcctgaccgggttgttccccccgacctcgggcaccgcctacatcctgggaaaagacattcgctctgagatgagcaccatccggcagaacctgggggtctgtccccagcataacgtgctgtttgacatgctgactgtcgaagaacacatctggttctatgcccgcttgaaagggctctctgagaagcacgtgaaggcggagatggagcagatggccctggatgttggtttgccatcaagcaagctgaaaagcaaaacaagccagctgtcaggtggaatgcagagaaagctatctgtggccttggcctttgtcgggggatctaaggttgtcattctggatgaacccacagctggtgtggacccttactcccgcaggggaatatgggagctgctgctgaaataccgacaaggccgcaccattattctctctacacaccacatggatgaagcggacgtcctgggggacaggattgccatcatctcccatgggaagctgtgctgtgtgggctcctccctgtttctgaagaaccagctgggaacaggctactacctgaccttggtcaagaaagatgtggaatcctccctcagttcctgcagaaacagtagtagcactgtgtcatacctgaaaaaggaggacagtgtttctcagagcagttctgatgctggcctgggcagcgaccatgagagtgacacgctgaccatcgatgtctctgctatctccaacctcatcaggaagcatgtgtctgaagcccggctggtggaagacatagggcatgagctgacctatgtgctgccatatgaagctgctaaggagggagcctttgtggaactctttcatgagattgatgaccggctctcagacctgggcatttctagttatggcatctcagagacgaccctggaagaaatattcctcaaggtggccgaagagagtggggtggatgctgagacctcagatggtaccttgccagcaagacgaaacaggcgggccttcggggacaagcagagctgtcttcgcccgttcactgaagatgatgctgctgatccaaatgattctgacatagacccagaatccagagagacagacttgctcagtgggatggatggcaaagggtcctaccaggtgaaaggctggaaacttacacagcaacagtttgtggcccttttgtggaagagactgctaattgccagacggagtcggaaaggattttttgctcagattgtcttgccagctgtgtttgtctgcattgcccttgtgttcagcctgatcgtgccaccctttggcaagtaccccagcctggaacttcagccctggatgtacaacgaacagtacacatttgtcagcaatgatgctcctgaggacacgggaaccctggaactcttaaacgccctcaccaaagaccctggcttcgggacccgctgtatggaaggaaacccaatcccagacacgccctgccaggcaggggaggaagagtggaccactgccccagttccccagaccatcatggacctcttccagaatgggaactggacaatgcagaacccttcacctgcatgccagtgtagcagcgacaaaatcaagaagatgctgcctgtgtgtcccccaggggcaggggggctgcctcctccacaaagaaaacaaaacactgcagatatccttcaggacctgacaggaagaaacatttcggattatctggtgaagacgtatgtgcagatcatagccaaaagcttaaagaacaagatctgggtgaatgagtttaggtatggcggcttttccctgggtgtcagtaatactcaagcacttcctccgagtcaagaagttaatgatgccaccaaacaaatgaagaaacacctaaagctggccaaggacagttctgcagatcgatttctcaacagcttgggaagatttatgacaggactggacaccagaaataatgtcaaggtgtggttcaataacaagggctggcatgcaatcagctctttcctgaatgtcatcaacaatgccattctccgggccaacctgcaaaagggagagaaccctagccattatggaattactgctttcaatcatcccctgaatctcaccaagcagcagctctcagaggtggctccgatgaccacatcagtggatgtccttgtgtccatctgtgtcatctttgcaatgtccttcgtcccagccagctttgtcgtattcctgatccaggagcgggtcagcaaagcaaaacacctgcagttcatcagtggagtgaagcctgtcatctactggctctctaattttgtctgggatatgtgcaattacgttgtccctgccacactggtcattatcatcttcatctgcttccagcagaagtcctatgtgtcctccaccaatctgcctgtgctagcccttctacttttgctgtatgggtggtcaatcacacctctcatgtacccagcctcctttgtgttcaagatccccagcacagcctatgtggtgctcaccagcgtgaacctcttcattggcattaatggcagcgtggccacctttgtgctggagctgttcaccgacaataagctgaataatatcaatgatatcctgaagtccgtgttcttgatcttcccacatttttgcctgggacgagggctcatcgacatggtgaaaaaccaggcaatggctgatgccctggaaaggtttggggagaatcgctttgtgtcaccattatcttgggacttggtgggacgaaacctcttcgccatggccgtggaaggggtggtgttcttcctcattactgttctgatccagtacagattcttcatcaggcccagacctgtaaatgcaaagctatctcctctgaatgatgaagatgaagatgtgaggcgggaaagacagagaattcttgatggtggaggccagaatgacatcttagaaatcaaggagttgacgaagatatatagaaggaagcggaagcctgctgttgacaggatttgcgtgggcattcctcctggtgagtgctttgggctcctgggagttaatggggctggaaaatcatcaactttcaagatgttaacaggagataccactgttaccagaggagatgctttccttaacagaaatagtatcttatcaaacatccatgaagtacatcagaacatgggctactgccctcagtttgatgccatcacagagctgttgactgggagagaacacgtggagttctttgcccttttgagaggagtcccagagaaagaagttggcaaggttggtgagtgggcgattcggaaactgggcctcgtgaagtatggagaaaaatatgctggtaactatagtggaggcaacaaacgcaagctctctacagccatggctttgatcggcgggcctcctgtggtgtttctggatgaacccaccacaggcatggatcccaaagcccggcggttcttgtggaattgtgccctaagtgttgtcaaggaggggagatcagtagtgcttacatctcatagtatggaagaatgtgaagctctttgcactaggatggcaatcatggtcaatggaaggttcaggtgccttggcagtgtccagcatctaaaaaataggtttggagatggttatacaatagttgtacgaatagcagggtccaacccggacctgaagcctgtccaggatttctttggacttgcatttcctggaagtgttccaaaagagaaacaccggaacatgctacaataccagcttccatcttcattatcttctctggccaggatattcagcatcctctcccagagcaaaaagcgactccacatagaagactactctgtttctcagacaacacttgaccaagtatttgtgaactttgccaaggaccaaagtgatgatgaccacttaaaagacctctcattacacaaaaaccagacagtagtggacgttgcagttctcacatcttttctacaggatgagaaagtgaaagaaagctatgtatgaagaatcctgttcatacggggtggctgaaagtaaagaggnactagactttcctttgcaccatgtgaagtgttgtggagaaaagagccagaagttgatgtgggaagaagtaaactggatactgtactgatactattcaatgcaatgcaattcaatgcaatgaaaacaaaattccattacaggggcagtgcctttgtagcctatgtcttgtatggctctcaagtgaaagacttgaatttagttttttacctatacctatgtgaaactctattatggaacccaatggacatatgggtttgaactcacactttttttttttttttgttcctgtgtattctcattggggttgcaacaataattcatcaagtaatcatggccagcgattattgatcaaaatcaaaaggtaatgcacatcctcattcactaagccatgccatgcccaggagactggtttcccggtgacacatccattgctggcaatgagtgtgccagagttattagtgccaagtttttcagaaagtttgaagcaccatggtgtgtcatgctcacttttgtgaaagctgctctgctcagagtctatcaacattgaatatcagttgacagaatggtgccatgcgtggctaacatcctgctttgattccctctgataagctgttctggtggcagtaacatgcaacaaaaatgtgggtgtctctaggcacgggaaacttggttccattgttatattgtcctatgcttcgagccatgggtctacagggtcatccttatgagactcttaaatatacttagatcctggtaagaggcaaagaatcaacagccaaactgctggggctgcaagctgctgaagccagggcatgggattaaagagattgtgcgttcaaacctagggaagcctgtgcccatttgtcctgactgtctgctaacatggtacactgcatctcaagatgtttatctgacacaagtgtattatttctggctttttgaattaatctagaaaatgaaaagatggagttgtattttgacaaaaatgtttgtactttttaatgttatttggaattttaagttctatcagtgacttctgaatccttagaatggcctctttgtagaaccctgtggtatagaggagtatggccactgccccactatttttattttcttatgtaagtttgcatatcagtcatgactagtgcctagaaagcaatgtgatggtcaggatctcatgacattatatttgagtttctttcagatcatttaggatactcttaatctcacttcatcaatcaaatattttttgagtgtatgctgtagctgaaagagtatgtacgtacgtataagactagagagatattaagtctcagtacacttcctgtgccatgttattcagctcactggtttacaaatataggttgtcttgtggttgtaggagcccactgtaacaatactgggcagcctttttttttttttttaattgcaacaatgcaaaagccaagaaagtataagggtcacaagtctaaacaatgaattcttcaacagggaaaacagctagcttgaaaacttgctgaaaaacacaacttgtgtttatggcatttagtaccttcaaataattggctttgcagatattggataccccattaaatctgacagtctcaaatttttcatctcttcaatcactagtcaagaaaaatataaaaacaacaaatacttccatatggagcatttttcagagttttctaacccagtcttatttttctagtcagtaaacatttgtaaaaatactgtttcactaatacttactgttaactgtcttgagagaaaagaaaaatatgagagaactattgtttggggaagttcaagtgatctttcaatatcattactaacttcttccactttttccaaaatttgaatattaacgctaaaggtgtaagacttcagatttcaaattaatctttctatattttttaaatttacagaatattatataacccactgctgaaaaagaaaaaaatgattgttttagaagttaaagtcaatattgattttaaatataagtaatgaaggcatatttccaataactagtgatatggcatcgttgcattttacagtatcttcaaaaatacagaatttatagaataatttctcctcatttaatatttttcaaaatcaaagttatggtttcctcattttactaaaatcgtattctaattcttcattatagtaaatctatgagcaactccttacttcggttcctctgatttcaaggccatattttaaaaaatcaaaaggcactgtgaactattttgaagaaaacacaacattttaatacagattgaaaggacctcttctgaagctagaaacaatctatagttatacatcttcattaatactgtgttaccttttaaaatagtaattttttacattttcctgtgtaaacctaattgtggtagaaatttttaccaactctatactcaatcaagcaaaatttctgtatattccctgtggaatgtacctatgtgagtttcagaaattctcaaaatacgtgttcaaaaatttctgcttttgcatctttgggacacctcagaaaacttattaacaactgtgaatatgagaaatacagaagaaaataataagccctctatacataaatgcccagcacaattcattgttaaaaaacaaccaaacctcacactactgtatttcattatctgtactgaaagcaaatgctttgtgactattaaatgttgcacatcattcattcaaaaaaaaaaaaaaaaaaa

SEQ ID NO: 99 - DNA, 9870 bp, Homo sapiens
  modified_base (7138): a, t, c or g
gtaattgcgagcgagagtgagtggggccgggacccgcagagccgagccgacccttctctcccgggctgcggcagggcagggcggggagctccgcgcaccaacagagccggttctcagggcgctttgctccttgttttttccccggttctgttttctccccttctccggaaggcttgtcaaggggtaggagaaagagacgcaaacacaaaagtggaaaacagttaatgaccagccacggcgtccctgctgtgagctctggccgctgccttccagggctcccgagccacacgctgggggtgctggctgagggaacatggcttgttggcctcagctgaggttgctgctgtggaagaacctcactttcagaagaagacaaacatgtcagctgctgctggaagtggcctggcctctatttatcttcctgatcctgatctctgttcggctgagctacccaccctatgaacaacatgaatgccattttccaaataaagccatgccctctgcaggaacacttccttgggttcaggggattatctgtaatgccaacaacccctgtttccgttacccgactcctggggaggctcccggagttgttggaaactttaacaaatccattgtggctcgcctgttctcagatgctcggaggcttcttttatacagccagaaagacaccagcatgaaggacatgcgcaaagttctgagaacattacagcagatcaagaaatccagctcaaacttgaagcttcaagatttcctggtggacaatgaaaccttctctgggttcctgtatcacaacctctctctcccaaagtctactgtggacaagatgctgagggctgatgtcattctccacaaggtatttttgcaaggctaccagttacatttgacaagtctgtgcaatggatcaaaatcagaagagatgattcaacttggtgaccaagaagtttctgagctttgtggcctaccaagggagaaactggctgcagcagagcgagtacttcgttccaacatggacatcctgaagccaatcctgagaacactaaactctacatctcccttcccgagcaaggagctggccgaagccacaaaaacattgctgcatagtcttgggactctggcccaggagctgttcagcatgagaagctggagtgacatgcgacaggaggtgatgtttctgaccaatgtgaacagctccagctcctccacccaaatctaccaggctgtgtctcgtattgtctgcgggcatcccgagggagggggactgaagatcaagtctctcaactggtatgaggacaacaactacaaagccctctttggaggcaatggcactgaggaagatgctgaaaccttctatgacaactctacaactccttactgcaatgatttgatgaagaatttggagtctagtcctctttcccgcattatctggaaagctctgaagccgctgctcgttgggaagatcctgtatacacctgacactccagccacaaggcaggtcatggctgaggtgaacaagaccttccaggaactggctgtgttccatgatctggaaggcatgtgggaggaactcagccccaagatctggaccttcatggagaacagccaagaaatggaccttgtccggatgctgttggacagcagggacaatgaccacttttgggaacagcagttggatggcttagattggacagcccaagacatcgtggcgtttttggccaagcacccagaggatgtccagtccagtaatggttctgtgtacacctggagagaagctttcaacgagactaaccaggcaatccggaccatatctcgcttcatggagtgtgtcaacctgaacaagctagaacccatagcaacagaagtctggctcatcaacaagtccatggagctgctggatgagaggaagttctgggctggtattgtgttcactggaattactccaggcagcattgagctgccccatcatgtcaagtacaagatccgaatggacattgacaatgtggagaggacaaataaaatcaaggatgggtactgggaccctggtcctcgagctgacccctttgaggacatgcggtacgtctgggggggcttcgcctacttgcaggatgtggtggagcaggcaatcatcagggtgctgacgggcaccgagaagaaaactggtgtctatatgcaacagatgccctatccctgttacgttgatgacatctttctgcgggtgatgagccggtcaatgcccctcttcatgacgctggcctggatttactcagtggctgtgatcatcaagggcatcgtgtatgagaaggaggcacggctgaaagagaccatgcggatcatgggcctggacaacagcatcctctggtttagctggttcattagtagcctcattcctcttcttgtgagcgctggcctgctagtggtcatcctgaagttaggaaacctgctgccctacagtgatcccagcgtggtgtttgtcttcctgtccgtgtttgctgtggtgacaatcctgcagtgcttcctgattagcacactcttctccagagccaacctggcagcagcctgtgggggcatcatctacttcacgctgtacctgccctacgtcctgtgtgtggcatggcaggactacgtgggcttcacactcaagatcttcgctagcctgctgtctcctgtggcttttgggtttggctgtgagtactttgccctttttgaggagcagggcattggagtgcagtgggacaacctgtttgagagtcctgtggaggaagatggcttcaatctcaccacttcggtctccatgatgctgtttgacaccttcctctatggggtgatgacctggtacattgaggctgtctttccaggccagtacggaattcccaggccctggtattttccttgcaccaagtcctactggtttggcgaggaaagtgatgagaagagccaccctggttccaaccagaagagaatatcagaaatctgcatggaggaggaacccacccacttgaagctgggcgtgtccattcagaacctggtaaaagtctaccgagatgggatgaaggtggctgtcgatggcctggcactgaatttttatgagggccagatcacctccttcctgggccacaatggagcggggaagacgaccaccatgtcaatcctgaccgggttgttccccccgacctcgggcaccgcctacatcctgggaaaagacattcgctctgagatgagcaccatccggcagaacctgggggtctgtccccagcataacgtgctgtttgacatgctgactgtcgaagaacacatctggttctatgcccgcttgaaagggctctctgagaagcacgtgaaggcggagatggagcagatggccctggatgttggtttgccatcaagcaagctgaaaagcaaaacaagccagctgtcaggtggaatgcagagaaagctatctgtggccttggcctttgtcgggggatctaaggttgtcattctggatgaacccacagctggtgtggacccttactcccgcaggggaatatgggagctgctgctgaaataccgacaaggccgcaccattattctctctacacaccacatggatgaagcggacgtcctgggggacaggattgccatcatctcccatgggaagctgtgctgtgtgggctcctccctgtttctgaagaaccagctgggaacaggctactacctgaccttggtcaagaaagatgtggaatcctccctcagttcctgcagaaacagtagtagcactgtgtcatacctgaaaaaggaggacagtgtttctcagagcagttctgatgctggcctgggcagcgaccatgagagtgacacgctgaccatcgatgtctctgctatctccaacctcatcaggaagcatgtgtctgaagcccggctggtggaagacatagggcatgagctgacctatgtgctgccatatgaagctgctaaggagggagcctttgtggaactctttcatgagattgatgaccggctctcagacctgggcatttctagttatggcatctcagagacgaccctggaagaaatattcctcaaggtggccgaagagagtggggtggatgctgagacctcagatggtaccttgccagcaagacgaaacaggcgggccttcggggacaagcagagctgtcttcgcccgttcactgaagatgatgctgctgatccaaatgattctgacatagacccagaatccagagagacagacttgctcagtgggatggatggcaaagggtcctaccaggtgaaaggctggaaacttacacagcaacagtttgtggcccttttgtggaagagactgctaattgccagacggagtcggaaaggattttttgctcagattgtcttgccagctgtgtttgtctgcattgcccttgtgttcagcctgatcgtgccaccctttggcaagtaccccagcctggaacttcagccctggatgtacaacgaacagtacacatttgtcagcaatgatgctcctgaggacacgggaaccctggaactcttaaacgccctcaccaaagaccctggcttcgggacccgctgtatggaaggaaacccaatcccagacacgccctgccaggcaggggaggaagagtggaccactgccccagttccccagaccatcatggacctcttccagaatgggaactggacaatgcagaacccttcacctgcatgccagtgtagcagcgacaaaatcaagaagatgctgcctgtgtgtcccccaggggcaggggggctgcctcctccacaaagaaaacaaaacactgcagatatccttcaggacctgacaggaagaaacatttcggattatctggtgaagacgtatgtgcagatcatagccaaaagcttaaagaacaagatctgggtgaatgagtttaggtatggcggcttttccctgggtgtcagtaatactcaagcacttcctccgagtcaagaagttaatgatgccaccaaacaaatgaagaaacacctaaagctggccaaggacagttctgcagatcgatttctcaacagcttgggaagatttatgacaggactggacaccagaaataatgtcaaggtgtggttcaataacaagggctggcatgcaatcagctctttcctgaatgtcatcaacaatgccattctccgggccaacctgcaaaagggagagaaccctagccattatggaattactgctttcaatcatcccctgaatctcaccaagcagcagctctcagaggtggctccgatgaccacatcagtggatgtccttgtgtccatctgtgtcatctttgcaatgtccttcgtcccagccagctttgtcgtattcctgatccaggagcgggtcagcaaagcaaaacacctgcagttcatcagtggagtgaagcctgtcatctactggctctctaattttgtctgggatatgtgcaattacgttgtccctgccacactggtcattatcatcttcatctgcttccagcagaagtcctatgtgtcctccaccaatctgcctgtgctagcccttctacttttgctgtatgggtggtcaatcacacctctcatgtacccagcctcctttgtgttcaagatccccagcacagcctatgtggtgctcaccagcgtgaacctcttcattggcattaatggcagcgtggccacctttgtgctggagctgttcaccgacaataagctgaataatatcaatgatatcctgaagtccgtgttcttgatcttcccacatttttgcctgggacgagggctcatcgacatggtgaaaaaccaggcaatggctgatgccctggaaaggtttggggagaatcgctttgtgtcaccattatcttgggacttggtgggacgaaacctcttcgccatggccgtggaaggggtggtgttcttcctcattactgttctgatccagtacagattcttcatcaggcccagacctgtaaatgcaaagctatctcctctgaatgatgaagatgaagatgtgaggcgggaaagacagagaattcttgatggtggaggccagaatgacatcttagaaatcaaggagttgacgaagatatatagaaggaagcggaagcctgctgttgacaggatttgcgtgggcattcctcctggtgagtgctttgggctcctgggagttaatggggctggaaaatcatcaactttcaagatgttaacaggagataccactgttaccagaggagatgctttccttaacagaaatagtatcttatcaaacatccatgaagtacatcagaacatgggctactgccctcagtttgatgccatcacagagctgttgactgggagagaacacgtggagttctttgcccttttgagaggagtcccagagaaagaagttggcaaggttggtgagtgggcgattcggaaactgggcctcgtgaagtatggagaaaaatatgctggtaactatagtggaggcaacaaacgcaagctctctacagccatggctttgatcggcgggcctcctgtggtgtttctggatgaacccaccacaggcatggatcccaaagcccggcggttcttgtggaattgtgccctaagtgttgtcaaggaggggagatcagtagtgcttacatctcatagtatggaagaatgtgaagctctttgcactaggatggcaatcatggtcaatggaaggttcaggtgccttggcagtgtccagcatctaaaaaataggtttggagatggttatacaatagttgtacgaatagcagggtccaacccggacctgaagcctgtccaggatttctttggacttgcatttcctggaagtgttccaaaagagaaacaccggaacatgctacaataccagcttccatcttcattatcttctctggccaggatattcagcatcctctcccagagcaaaaagcgactccacatagaagactactctgtttctcagacaacacttgaccaagtatttgtgaactttgccaaggaccaaagtgatgatgaccacttaaaagacctctcattacacaaaaaccagacagtagtggacgttgcagttctcacatcttttctacaggatgagaaagtgaaagaaagctatgtatgaagaatcctgttcatacggggtggctgaaagtaaagaggnactagactttcctttgcaccatgtgaagtgttgtggagaaaagagccagaagttgatgtgggaagaagtaaactggatactgtactgatactattcaatgcaatgcaattcaatgcaatgaaaacaaaattccattacaggggcagtgcctttgtagcctatgtcttgtatggctctcaagtgaaagacttgaatttagttttttacctatacctatgtgaaactctattatggaacccaatggacatatgggtttgaactcacactttttttttttttttgttcctgtgtattctcattggggttgcaacaataattcatcaagtaatcatggccagcgattattgatcaaaatcaaaaggtaatgcacatcctcattcactaagccatgccatgcccaggagactggtttcccggtgacacatccattgctggcaatgagtgtgccagagttattagtgccaagtttttcagaaagtttgaagcaccatggtgtgtcatgctcacttttgtgaaagctgctctgctcagagtctatcaacattgaatatcagttgacagaatggtgccatgcgtggctaacatcctgctttgattccctctgataagctgttctggtggcagtaacatgcaacaaaaatgtgggtgtctctaggcacgggaaacttggttccattgttatattgtcctatgcttcgagccatgggtctacagggtcatccttatgagactcttaaatatacttagatcctggtaagaggcaaagaatcaacagccaaactgctggggctgcaagctgctgaagccagggcatgggattaaagagattgtgcgttcaaacctagggaagcctgtgcccatttgtcctgactgtctgctaacatggtacactgcatctcaagatgtttatctgacacaagtgtattatttctggctttttgaattaatctagaaaatgaaaagatggagttgtattttgacaaaaatgtttgtactttttaatgttatttggaattttaagttctatcagtgacttctgaatccttagaatggcctctttgtagaaccctgtggtatagaggagtatggccactgccccactatttttattttcttatgtaagtttgcatatcagtcatgactagtgcctagaaagcaatgtgatggtcaggatctcatgacattatatttgagtttctttcagatcatttaggatactcttaatctcacttcatcaatcaaatattttttgagtgtatgctgtagctgaaagagtatgtacgtacgtataagactagagagatattaagtctcagtacacttcctgtgccatgttattcagctcactggtttacaaatataggttgtcttgtggttgtaggagcccactgtaacaatactgggcagcctttttttttttttttaattgcaacaatgcaaaagccaagaaagtataagggtcacaagtctaaacaatgaattcttcaacagggaaaacagctagcttgaaaacttgctgaaaaacacaacttgtgtttatggcatttagtaccttcaaataattggctttgcagatattggataccccattaaatctgacagtctcaaatttttcatctcttcaatcactagtcaagaaaaatataaaaacaacaaatacttccatatggagcatttttcagagttttctaacccagtcttatttttctagtcagtaaacatttgtaaaaatactgtttcactaatacttactgttaactgtcttgagagaaaagaaaaatatgagagaactattgtttggggaagttcaagtgatctttcaatatcattactaacttcttccactttttccaaaatttgaatattaacgctaaaggtgtaagacttcagatttcaaattaatctttctatattttttaaatttacagaatattatataacccactgctgaaaaagaaaaaaatgattgttttagaagttaaagtcaatattgattttaaatataagtaatgaaggcatatttccaataactagtgatatggcatcgttgcattttacagtatcttcaaaaatacagaatttatagaataatttctcctcatttaatatttttcaaaatcaaagttatggtttcctcattttactaaaatcgtattctaattcttcattatagtaaatctatgagcaactccttacttcggttcctctgatttcaaggccatattttaaaaaatcaaaaggcactgtgaactattttgaagaaaacacaacattttaatacagattgaaaggacctcttctgaagctagaaacaatctatagttatacatcttcattaatactgtgttaccttttaaaatagtaattttttacattttcctgtgtaaacctaattgtggtagaaatttttaccaactctatactcaatcaagcaaaatttctgtatattccctgtggaatgtacctatgtgagtttcagaaattctcaaaatacgtgttcaaaaatttctgcttttgcatctttgggacacctcagaaaacttattaacaactgtgaatatgagaaatacagaagaaaataataagccctctatacataaatgcccagcacaattcattgttaaaaaacaaccaaacctcacactactgtatttcattatctgtactgaaagcaaatgctttgtgactattaaatgttgcacatcattcattcaaaaaaaaaaaaaaaaaaa

SEQ ID NO: 100 - DNA, 9870 bp, Homo sapiens
  modified_base (7138): a, t, c or g
gtaattgcgagcgagagtgagtggggccgggacccgcagagccgagccgacccttctctcccgggctgcggcagggcagggcggggagctccgcgcaccaacagagccggttctcagggcgctttgctccttgttttttccccggttctgttttctccccttctccggaaggcttgtcaaggggtaggagaaagagacgcaaacacaaaagtggaaaacagttaatgaccagccacggcgtccctgctgtgagctctggccgctgccttccagggctcccgagccacacgctgggggtgctggctgagggaacatggcttgttggcctcagctgaggttgctgctgtggaagaacctcactttcagaagaagacaaacatgtcagctgctgctggaagtggcctggcctctatttatcttcctgatcctgatctctgttcggctgagctacccaccctatgaacaacatgaatgccattttccaaataaagccatgccctctgcaggaacacttccttgggttcaggggattatctgtaatgccaacaacccctgtttccgttacccgactcctggggaggctcccggagttgttggaaactttaacaaatccattgtggctcgcctgttctcagatgctcggaggcttcttttatacagccagaaagacaccagcatgaaggacatgcgcaaagttctgagaacattacagcagatcaagaaatccagctcaaacttgaagcttcaagatttcctggtggacaatgaaaccttctctgggttcctgtatcacaacctctctctcccaaagtctactgtggacaagatgctgagggctgatgtcattctccacaaggtatttttgcaaggctaccagttacatttgacaagtctgtgcaatggatcaaaatcagaagagatgattcaacttggtgaccaagaagtttctgagctttgtggcctaccaagggagaaactggctgcagcagagcgagtacttcgttccaacatggacatcctgaagccaatcctgagaacactaaactctacatctcccttcccgagcaaggagctggccgaagccacaaaaacattgctgcatagtcttgggactctggcccaggagctgttcagcatgagaagctggagtgacatgcgacaggaggtgatgtttctgaccaatgtgaacagctccagctcctccacccaaatctaccaggctgtgtctcgtattgtctgcgggcatcccgagggaggggggctgaagatcaagtctctcaactggtatgaggacaacaactacaaagccctctttggaggcaatggcactgaggaagatgctgaaaccttctatgacaactctacaactccttactgcaatgatttgatgaagaatttggagtctagtcctctttcccgcattatctggaaagctctgaagccgctgctcgttgggaagatcctgtatacacctgacactccagccacaaggcaggtcatggctgaggtgaacaagaccttccaggaactggctgtgttccatgatctggaaggcatgtgggaggaactcagccccaagatctggaccttcatggagaacagccaagaaatggaccttgtccggatgctgttggacagcagggacaatgaccacttttgggaacagcagttggatggcttagattggacagcccaagacatcgtggcgtttttggccaagcacccagaggatgtccagtccagtaatggttctgtgtacacctggagagaagctttcaacgagactaaccaggcaatccggaccatatctcgcttcatggagtgtgtcaacctgaacaagctagaacccatagcaacagaagtctggctcatcaacaagtccatggagctgctggatgagaggaagttctgggctggtattgtgttcactggaattactccaggcagtattgagctgccccatcatgtcaagtacaagatccgaatggacattgacaatgtggagaggacaaataaaatcaaggatgggtactgggaccctggtcctcgagctgacccctttgaggacatgcggtacgtctgggggggcttcgcctacttgcaggatgtggtggagcaggcaatcatcagggtgctgacgggcaccgagaagaaaactggtgtctatatgcaacagatgccctatccctgttacgttgatgacatctttctgcgggtgatgagccggtcaatgcccctcttcatgacgctggcctggatttactcagtggctgtgatcatcaagggcatcgtgtatgagaaggaggcacggctgaaagagaccatgcggatcatgggcctggacaacagcatcctctggtttagctggttcattagtagcctcattcctcttcttgtgagcgctggcctgctagtggtcatcctgaagttaggaaacctgctgccctacagtgatcccagcgtggtgtttgtcttcctgtccgtgtttgctgtggtgacaatcctgcagtgcttcctgattagcacactcttctccagagccaacctggcagcagcctgtgggggcatcatctacttcacgctgtacctgccctacgtcctgtgtgtggcatggcaggactacgtgggcttcacactcaagatcttcgctagcctgctgtctcctgtggcttttgggtttggctgtgagtactttgccctttttgaggagcagggcattggagtgcagtgggacaacctgtttgagagtcctgtggaggaagatggcttcaatctcaccacttcggtctccatgatgctgtttgacaccttcctctatggggtgatgacctggtacattgaggctgtctttccaggccagtacggaattcccaggccctggtattttccttgcaccaagtcctactggtttggcgaggaaagtgatgagaagagccaccctggttccaaccagaagagaatatcagaaatctgcatggaggaggaacccacccacttgaagctgggcgtgtccattcagaacctggtaaaagtctaccgagatgggatgaaggtggctgtcgatggcctggcactgaatttttatgagggccagatcacctccttcctgggccacaatggagcggggaagacgaccaccatgtcaatcctgaccgggttgttccccccgacctcgggcaccgcctacatcctgggaaaagacattcgctctgagatgagcaccatccggcagaacctgggggtctgtccccagcataacgtgctgtttgacatgctgactgtcgaagaacacatctggttctatgcccgcttgaaagggctctctgagaagcacgtgaaggcggagatggagcagatggccctggatgttggtttgccatcaagcaagctgaaaagcaaaacaagccagctgtcaggtggaatgcagagaaagctatctgtggccttggcctttgtcgggggatctaaggttgtcattctggatgaacccacagctggtgtggacccttactcccgcaggggaatatgggagctgctgctgaaataccgacaaggccgcaccattattctctctacacaccacatggatgaagcggacgtcctgggggacaggattgccatcatctcccatgggaagctgtgctgtgtgggctcctccctgtttctgaagaaccagctgggaacaggctactacctgaccttggtcaagaaagatgtggaatcctccctcagttcctgcagaaacagtagtagcactgtgtcatacctgaaaaaggaggacagtgtttctcagagcagttctgatgctggcctgggcagcgaccatgagagtgacacgctgaccatcgatgtctctgctatctccaacctcatcaggaagcatgtgtctgaagcccggctggtggaagacatagggcatgagctgacctatgtgctgccatatgaagctgctaaggagggagcctttgtggaactctttcatgagattgatgaccggctctcagacctgggcatttctagttatggcatctcagagacgaccctggaagaaatattcctcaaggtggccgaagagagtggggtggatgctgagacctcagatggtaccttgccagcaagacgaaacaggcgggccttcggggacaagcagagctgtcttcgcccgttcactgaagatgatgctgctgatccaaatgattctgacatagacccagaatccagagagacagacttgctcagtgggatggatggcaaagggtcctaccaggtgaaaggctggaaacttacacagcaacagtttgtggcccttttgtggaagagactgctaattgccagacggagtcggaaaggattttttgctcagattgtcttgccagctgtgtttgtctgcattgcccttgtgttcagcctgatcgtgccaccctttggcaagtaccccagcctggaacttcagccctggatgtacaacgaacagtacacatttgtcagcaatgatgctcctgaggacacgggaaccctggaactcttaaacgccctcaccaaagaccctggcttcgggacccgctgtatggaaggaaacccaatcccagacacgccctgccaggcaggggaggaagagtggaccactgccccagttccccagaccatcatggacctcttccagaatgggaactggacaatgcagaacccttcacctgcatgccagtgtagcagcgacaaaatcaagaagatgctgcctgtgtgtcccccaggggcaggggggctgcctcctccacaaagaaaacaaaacactgcagatatccttcaggacctgacaggaagaaacatttcggattatctggtgaagacgtatgtgcagatcatagccaaaagcttaaagaacaagatctgggtgaatgagtttaggtatggcggcttttccctgggtgtcagtaatactcaagcacttcctccgagtcaagaagttaatgatgccaccaaacaaatgaagaaacacctaaagctggccaaggacagttctgcagatcgatttctcaacagcttgggaagatttatgacaggactggacaccagaaataatgtcaaggtgtggttcaataacaagggctggcatgcaatcagctctttcctgaatgtcatcaacaatgccattctccgggccaacctgcaaaagggagagaaccctagccattatggaattactgctttcaatcatcccctgaatctcaccaagcagcagctctcagaggtggctccgatgaccacatcagtggatgtccttgtgtccatctgtgtcatctttgcaatgtccttcgtcccagccagctttgtcgtattcctgatccaggagcgggtcagcaaagcaaaacacctgcagttcatcagtggagtgaagcctgtcatctactggctctctaattttgtctgggatatgtgcaattacgttgtccctgccacactggtcattatcatcttcatctgcttccagcagaagtcctatgtgtcctccaccaatctgcctgtgctagcccttctacttttgctgtatgggtggtcaatcacacctctcatgtacccagcctcctttgtgttcaagatccccagcacagcctatgtggtgctcaccagcgtgaacctcttcattggcattaatggcagcgtggccacctttgtgctggagctgttcaccgacaataagctgaataatatcaatgatatcctgaagtccgtgttcttgatcttcccacatttttgcctgggacgagggctcatcgacatggtgaaaaaccaggcaatggctgatgccctggaaaggtttggggagaatcgctttgtgtcaccattatcttgggacttggtgggacgaaacctcttcgccatggccgtggaaggggtggtgttcttcctcattactgttctgatccagtacagattcttcatcaggcccagacctgtaaatgcaaagctatctcctctgaatgatgaagatgaagatgtgaggcgggaaagacagagaattcttgatggtggaggccagaatgacatcttagaaatcaaggagttgacgaagatatatagaaggaagcggaagcctgctgttgacaggatttgcgtgggcattcctcctggtgagtgctttgggctcctgggagttaatggggctggaaaatcatcaactttcaagatgttaacaggagataccactgttaccagaggagatgctttccttaacagaaatagtatcttatcaaacatccatgaagtacatcagaacatgggctactgccctcagtttgatgccatcacagagctgttgactgggagagaacacgtggagttctttgcccttttgagaggagtcccagagaaagaagttggcaaggttggtgagtgggcgattcggaaactgggcctcgtgaagtatggagaaaaatatgctggtaactatagtggaggcaacaaacgcaagctctctacagccatggctttgatcggcgggcctcctgtggtgtttctggatgaacccaccacaggcatggatcccaaagcccggcggttcttgtggaattgtgccctaagtgttgtcaaggaggggagatcagtagtgcttacatctcatagtatggaagaatgtgaagctctttgcactaggatggcaatcatggtcaatggaaggttcaggtgccttggcagtgtccagcatctaaaaaataggtttggagatggttatacaatagttgtacgaatagcagggtccaacccggacctgaagcctgtccaggatttctttggacttgcatttcctggaagtgttccaaaagagaaacaccggaacatgctacaataccagcttccatcttcattatcttctctggccaggatattcagcatcctctcccagagcaaaaagcgactccacatagaagactactctgtttctcagacaacacttgaccaagtatttgtgaactttgccaaggaccaaagtgatgatgaccacttaaaagacctctcattacacaaaaaccagacagtagtggacgttgcagttctcacatcttttctacaggatgagaaagtgaaagaaagctatgtatgaagaatcctgttcatacggggtggctgaaagtaaagaggnactagactttcctttgcaccatgtgaagtgttgtggagaaaagagccagaagttgatgtgggaagaagtaaactggatactgtactgatactattcaatgcaatgcaattcaatgcaatgaaaacaaaattccattacaggggcagtgcctttgtagcctatgtcttgtatggctctcaagtgaaagacttgaatttagttttttacctatacctatgtgaaactctattatggaacccaatggacatatgggtttgaactcacactttttttttttttttgttcctgtgtattctcattggggttgcaacaataattcatcaagtaatcatggccagcgattattgatcaaaatcaaaaggtaatgcacatcctcattcactaagccatgccatgcccaggagactggtttcccggtgacacatccattgctggcaatgagtgtgccagagttattagtgccaagtttttcagaaagtttgaagcaccatggtgtgtcatgctcacttttgtgaaagctgctctgctcagagtctatcaacattgaatatcagttgacagaatggtgccatgcgtggctaacatcctgctttgattccctctgataagctgttctggtggcagtaacatgcaacaaaaatgtgggtgtctctaggcacgggaaacttggttccattgttatattgtcctatgcttcgagccatgggtctacagggtcatccttatgagactcttaaatatacttagatcctggtaagaggcaaagaatcaacagccaaactgctggggctgcaagctgctgaagccagggcatgggattaaagagattgtgcgttcaaacctagggaagcctgtgcccatttgtcctgactgtctgctaacatggtacactgcatctcaagatgtttatctgacacaagtgtattatttctggctttttgaattaatctagaaaatgaaaagatggagttgtattttgacaaaaatgtttgtactttttaatgttatttggaattttaagttctatcagtgacttctgaatccttagaatggcctctttgtagaaccctgtggtatagaggagtatggccactgccccactatttttattttcttatgtaagtttgcatatcagtcatgactagtgcctagaaagcaatgtgatggtcaggatctcatgacattatatttgagtttctttcagatcatttaggatactcttaatctcacttcatcaatcaaatattttttgagtgtatgctgtagctgaaagagtatgtacgtacgtataagactagagagatattaagtctcagtacacttcctgtgccatgttattcagctcactggtttacaaatataggttgtcttgtggttgtaggagcccactgtaacaatactgggcagcctttttttttttttttaattgcaacaatgcaaaagccaagaaagtataagggtcacaagtctaaacaatgaattcttcaacagggaaaacagctagcttgaaaacttgctgaaaaacacaacttgtgtttatggcatttagtaccttcaaataattggctttgcagatattggataccccattaaatctgacagtctcaaatttttcatctcttcaatcactagtcaagaaaaatataaaaacaacaaatacttccatatggagcatttttcagagttttctaacccagtcttatttttctagtcagtaaacatttgtaaaaatactgtttcactaatacttactgttaactgtcttgagagaaaagaaaaatatgagagaactattgtttggggaagttcaagtgatctttcaatatcattactaacttcttccactttttccaaaatttgaatattaacgctaaaggtgtaagacttcagatttcaaattaatctttctatattttttaaatttacagaatattatataacccactgctgaaaaagaaaaaaatgattgttttagaagttaaagtcaatattgattttaaatataagtaatgaaggcatatttccaataactagtgatatggcatcgttgcattttacagtatcttcaaaaatacagaatttatagaataatttctcctcatttaatatttttcaaaatcaaagttatggtttcctcattttactaaaatcgtattctaattcttcattatagtaaatctatgagcaactccttacttcggttcctctgatttcaaggccatattttaaaaaatcaaaaggcactgtgaactattttgaagaaaacacaacattttaatacagattgaaaggacctcttctgaagctagaaacaatctatagttatacatcttcattaatactgtgttaccttttaaaatagtaattttttacattttcctgtgtaaacctaattgtggtagaaatttttaccaactctatactcaatcaagcaaaatttctgtatattccctgtggaatgtacctatgtgagtttcagaaattctcaaaatacgtgttcaaaaatttctgcttttgcatctttgggacacctcagaaaacttattaacaactgtgaatatgagaaatacagaagaaaataataagccctctatacataaatgcccagcacaattcattgttaaaaaacaaccaaacctcacactactgtatttcattatctgtactgaaagcaaatgctttgtgactattaaatgttgcacatcattcattcaaaaaaaaaaaaaaaaaaa

SEQ ID NO: 101 - DNA, 9870 bp, Homo sapiens
  modified_base (7138): a, t, c or g
gtaattgcgagcgagagtgagtggggccgggacccgcagagccgagccgacccttctctcccgggctgcggcagggcagggcggggagctccgcgcaccaacagagccggttctcagggcgctttgctccttgttttttccccggttctgttttctccccttctccggaaggcttgtcaaggggtaggagaaagagacgcaaacacaaaagtggaaaacagttaatgaccagccacggcgtccctgctgtgagctctggccgctgccttccagggctcccgagccacacgctgggggtgctggctgagggaacatggcttgttggcctcagctgaggttgctgctgtggaagaacctcactttcagaagaagacaaacatgtcagctgctgctggaagtggcctggcctctatttatcttcctgatcctgatctctgttcggctgagctacccaccctatgaacaacatgaatgccattttccaaataaagccatgccctctgcaggaacacttccttgggttcaggggattatctgtaatgccaacaacccctgtttccgttacccgactcctggggaggctcccggagttgttggaaactttaacaaatccattgtggctcgcctgttctcagatgctcggaggcttcttttatacagccagaaagacaccagcatgaaggacatgcgcaaagttctgagaacattacagcagatcaagaaatccagctcaaacttgaagcttcaagatttcctggtggacaatgaaaccttctctgggttcctgtatcacaacctctctctcccaaagtctactgtggacaagatgctgagggctgatgtcattctccacaaggtatttttgcaaggctaccagttacatttgacaagtctgtgcaatggatcaaaatcagaagagatgattcaacttggtgaccaagaagtttctgagctttgtggcctaccaagggagaaactggctgcagcagagcgagtacttcgttccaacatggacatcctgaagccaatcctgagaacactaaactctacatctcccttcccgagcaaggagctggccgaagccacaaaaacattgctgcatagtcttgggactctggcccaggagctgttcagcatgagaagctggagtgacatgcgacaggaggtgatgtttctgaccaatgtgaacagctccagctcctccacccaaatctaccaggctgtgtctcgtattgtctgcgggcatcccgagggaggggggctgaagatcaagtctctcaactggtatgaggacaacaactacaaagccctctttggaggcaatggcactgaggaagatgctgaaaccttctatgacaactctacaactccttactgcaatgatttgatgaagaatttggagtctagtcctctttcccgcattatctggaaagctctgaagccgctgctcgttgggaagatcctgtatacacctgacactccagccacaaggcaggtcatggctgaggtgaacaagaccttccaggaactggctgtgttccatgatctggaaggcatgtgggaggaactcagccccaagatctggaccttcatggagaacagccaagaaatggaccttgtccggatgctgttggacagcagggacaatgaccacttttgggaacagcagttggatggcttagattggacagcccaagacatcgtggcgtttttggccaagcacccagaggatgtccagtccagtaatggttctgtgtacacctggagagaagctttcaacgagactaaccaggcaatccggaccatatctcgcttcatggagtgtgtcaacctgaacaagctagaacccatagcaacagaagtctggctcatcaacaagtccatggagctgctggatgagaggaagttctgggctggtattgtgttcactggaattactccaggcagcattgagctgccccatcatgtcaagtacaagatccgaatggacattgacaatgtggagaggacaaataaaatcaaggatgggtactgggaccctggtcctcgagctgacccctttgaggacatgcggtacgtctgggggggcttcgcctacttgcaggatgtggtggagcaggcaatcatcagggtgctgacgggcaccgagaagaaaactggtgtctatatgcaacagatgccctatccctgttacgttgatgacatctttctgcgggtgatgagccggtcaatgcccctcttcatgacgctggcctggatttactcagtggctgtgatcatcaagggcatcgtgtatgagaaggaggcacggctgaaagagaccatgcggatcatgggcctggacaacagcatactctggtttagctggttcattagtagcctcattcctcttcttgtgagcgctggcctgctagtggtcatcctgaagttaggaaacctgctgccctacagtgatcccagcgtggtgtttgtcttcctgtccgtgtttgctgtggtgacaatcctgcagtgcttcctgattagcacactcttctccagagccaacctggcagcagcctgtgggggcatcatctacttcacgctgtacctgccctacgtcctgtgtgtggcatggcaggactacgtgggcttcacactcaagatcttcgctagcctgctgtctcctgtggcttttgggtttggctgtgagtactttgccctttttgaggagcagggcattggagtgcagtgggacaacctgtttgagagtcctgtggaggaagatggcttcaatctcaccacttcggtctccatgatgctgtttgacaccttcctctatggggtgatgacctggtacattgaggctgtctttccaggccagtacggaattcccaggccctggtattttccttgcaccaagtcctactggtttggcgaggaaagtgatgagaagagccaccctggttccaaccagaagagaatatcagaaatctgcatggaggaggaacccacccacttgaagctgggcgtgtccattcagaacctggtaaaagtctaccgagatgggatgaaggtggctgtcgatggcctggcactgaatttttatgagggccagatcacctccttcctgggccacaatggagcggggaagacgaccaccatgtcaatcctgaccgggttgttccccccgacctcgggcaccgcctacatcctgggaaaagacattcgctctgagatgagcaccatccggcagaacctgggggtctgtccccagcataacgtgctgtttgacatgctgactgtcgaagaacacatctggttctatgcccgcttgaaagggctctctgagaagcacgtgaaggcggagatggagcagatggccctggatgttggtttgccatcaagcaagctgaaaagcaaaacaagccagctgtcaggtggaatgcagagaaagctatctgtggccttggcctttgtcgggggatctaaggttgtcattctggatgaacccacagctggtgtggacccttactcccgcaggggaatatgggagctgctgctgaaataccgacaaggccgcaccattattctctctacacaccacatggatgaagcggacgtcctgggggacaggattgccatcatctcccatgggaagctgtgctgtgtgggctcctccctgtttctgaagaaccagctgggaacaggctactacctgaccttggtcaagaaagatgtggaatcctccctcagttcctgcagaaacagtagtagcactgtgtcatacctgaaaaaggaggacagtgtttctcagagcagttctgatgctggcctgggcagcgaccatgagagtgacacgctgaccatcgatgtctctgctatctccaacctcatcaggaagcatgtgtctgaagcccggctggtggaagacatagggcatgagctgacctatgtgctgccatatgaagctgctaaggagggagcctttgtggaactctttcatgagattgatgaccggctctcagacctgggcatttctagttatggcatctcagagacgaccctggaagaaatattcctcaaggtggccgaagagagtggggtggatgctgagacctcagatggtaccttgccagcaagacgaaacaggcgggccttcggggacaagcagagctgtcttcgcccgttcactgaagatgatgctgctgatccaaatgattctgacatagacccagaatccagagagacagacttgctcagtgggatggatggcaaagggtcctaccaggtgaaaggctggaaacttacacagcaacagtttgtggcccttttgtggaagagactgctaattgccagacggagtcggaaaggattttttgctcagattgtcttgccagctgtgtttgtctgcattgcccttgtgttcagcctgatcgtgccaccctttggcaagtaccccagcctggaacttcagccctggatgtacaacgaacagtacacatttgtcagcaatgatgctcctgaggacacgggaaccctggaactcttaaacgccctcaccaaagaccctggcttcgggacccgctgtatggaaggaaacccaatcccagacacgccctgccaggcaggggaggaagagtggaccactgccccagttccccagaccatcatggacctcttccagaatgggaactggacaatgcagaacccttcacctgcatgccagtgtagcagcgacaaaatcaagaagatgctgcctgtgtgtcccccaggggcaggggggctgcctcctccacaaagaaaacaaaacactgcagatatccttcaggacctgacaggaagaaacatttcggattatctggtgaagacgtatgtgcagatcatagccaaaagcttaaagaacaagatctgggtgaatgagtttaggtatggcggcttttccctgggtgtcagtaatactcaagcacttcctccgagtcaagaagttaatgatgccaccaaacaaatgaagaaacacctaaagctggccaaggacagttctgcagatcgatttctcaacagcttgggaagatttatgacaggactggacaccagaaataatgtcaaggtgtggttcaataacaagggctggcatgcaatcagctctttcctgaatgtcatcaacaatgccattctccgggccaacctgcaaaagggagagaaccctagccattatggaattactgctttcaatcatcccctgaatctcaccaagcagcagctctcagaggtggctccgatgaccacatcagtggatgtccttgtgtccatctgtgtcatctttgcaatgtccttcgtcccagccagctttgtcgtattcctgatccaggagcgggtcagcaaagcaaaacacctgcagttcatcagtggagtgaagcctgtcatctactggctctctaattttgtctgggatatgtgcaattacgttgtccctgccacactggtcattatcatcttcatctgcttccagcagaagtcctatgtgtcctccaccaatctgcctgtgctagcccttctacttttgctgtatgggtggtcaatcacacctctcatgtacccagcctcctttgtgttcaagatccccagcacagcctatgtggtgctcaccagcgtgaacctcttcattggcattaatggcagcgtggccacctttgtgctggagctgttcaccgacaataagctgaataatatcaatgatatcctgaagtccgtgttcttgatcttcccacatttttgcctgggacgagggctcatcgacatggtgaaaaaccaggcaatggctgatgccctggaaaggtttggggagaatcgctttgtgtcaccattatcttgggacttggtgggacgaaacctcttcgccatggccgtggaaggggtggtgttcttcctcattactgttctgatccagtacagattcttcatcaggcccagacctgtaaatgcaaagctatctcctctgaatgatgaagatgaagatgtgaggcgggaaagacagagaattcttgatggtggaggccagaatgacatcttagaaatcaaggagttgacgaagatatatagaaggaagcggaagcctgctgttgacaggatttgcgtgggcattcctcctggtgagtgctttgggctcctgggagttaatggggctggaaaatcatcaactttcaagatgttaacaggagataccactgttaccagaggagatgctttccttaacagaaatagtatcttatcaaacatccatgaagtacatcagaacatgggctactgccctcagtttgatgccatcacagagctgttgactgggagagaacacgtggagttctttgcccttttgagaggagtcccagagaaagaagttggcaaggttggtgagtgggcgattcggaaactgggcctcgtgaagtatggagaaaaatatgctggtaactatagtggaggcaacaaacgcaagctctctacagccatggctttgatcggcgggcctcctgtggtgtttctggatgaacccaccacaggcatggatcccaaagcccggcggttcttgtggaattgtgccctaagtgttgtcaaggaggggagatcagtagtgcttacatctcatagtatggaagaatgtgaagctctttgcactaggatggcaatcatggtcaatggaaggttcaggtgccttggcagtgtccagcatctaaaaaataggtttggagatggttatacaatagttgtacgaatagcagggtccaacccggacctgaagcctgtccaggatttctttggacttgcatttcctggaagtgttccaaaagagaaacaccggaacatgctacaataccagcttccatcttcattatcttctctggccaggatattcagcatcctctcccagagcaaaaagcgactccacatagaagactactctgtttctcagacaacacttgaccaagtatttgtgaactttgccaaggaccaaagtgatgatgaccacttaaaagacctctcattacacaaaaaccagacagtagtggacgttgcagttctcacatcttttctacaggatgagaaagtgaaagaaagctatgtatgaagaatcctgttcatacggggtggctgaaagtaaagaggnactagactttcctttgcaccatgtgaagtgttgtggagaaaagagccagaagttgatgtgggaagaagtaaactggatactgtactgatactattcaatgcaatgcaattcaatgcaatgaaaacaaaattccattacaggggcagtgcctttgtagcctatgtcttgtatggctctcaagtgaaagacttgaatttagttttttacctatacctatgtgaaactctattatggaacccaatggacatatgggtttgaactcacactttttttttttttttgttcctgtgtattctcattggggttgcaacaataattcatcaagtaatcatggccagcgattattgatcaaaatcaaaaggtaatgcacatcctcattcactaagccatgccatgcccaggagactggtttcccggtgacacatccattgctggcaatgagtgtgccagagttattagtgccaagtttttcagaaagtttgaagcaccatggtgtgtcatgctcacttttgtgaaagctgctctgctcagagtctatcaacattgaatatcagttgacagaatggtgccatgcgtggctaacatcctgctttgattccctctgataagctgttctggtggcagtaacatgcaacaaaaatgtgggtgtctctaggcacgggaaacttggttccattgttatattgtcctatgcttcgagccatgggtctacagggtcatccttatgagactcttaaatatacttagatcctggtaagaggcaaagaatcaacagccaaactgctggggctgcaagctgctgaagccagggcatgggattaaagagattgtgcgttcaaacctagggaagcctgtgcccatttgtcctgactgtctgctaacatggtacactgcatctcaagatgtttatctgacacaagtgtattatttctggctttttgaattaatctagaaaatgaaaagatggagttgtattttgacaaaaatgtttgtactttttaatgttatttggaattttaagttctatcagtgacttctgaatccttagaatggcctctttgtagaaccctgtggtatagaggagtatggccactgccccactatttttattttcttatgtaagtttgcatatcagtcatgactagtgcctagaaagcaatgtgatggtcaggatctcatgacattatatttgagtttctttcagatcatttaggatactcttaatctcacttcatcaatcaaatattttttgagtgtatgctgtagctgaaagagtatgtacgtacgtataagactagagagatattaagtctcagtacacttcctgtgccatgttattcagctcactggtttacaaatataggttgtcttgtggttgtaggagcccactgtaacaatactgggcagcctttttttttttttttaattgcaacaatgcaaaagccaagaaagtataagggtcacaagtctaaacaatgaattcttcaacagggaaaacagctagcttgaaaacttgctgaaaaacacaacttgtgtttatggcatttagtaccttcaaataattggctttgcagatattggataccccattaaatctgacagtctcaaatttttcatctcttcaatcactagtcaagaaaaatataaaaacaacaaatacttccatatggagcatttttcagagttttctaacccagtcttatttttctagtcagtaaacatttgtaaaaatactgtttcactaatacttactgttaactgtcttgagagaaaagaaaaatatgagagaactattgtttggggaagttcaagtgatctttcaatatcattactaacttcttccactttttccaaaatttgaatattaacgctaaaggtgtaagacttcagatttcaaattaatctttctatattttttaaatttacagaatattatataacccactgctgaaaaagaaaaaaatgattgttttagaagttaaagtcaatattgattttaaatataagtaatgaaggcatatttccaataactagtgatatggcatcgttgcattttacagtatcttcaaaaatacagaatttatagaataatttctcctcatttaatatttttcaaaatcaaagttatggtttcctcattttactaaaatcgtattctaattcttcattatagtaaatctatgagcaactccttacttcggttcctctgatttcaaggccatattttaaaaaatcaaaaggcactgtgaactattttgaagaaaacacaacattttaatacagattgaaaggacctcttctgaagctagaaacaatctatagttatacatcttcattaatactgtgttaccttttaaaatagtaattttttacattttcctgtgtaaacctaattgtggtagaaatttttaccaactctatactcaatcaagcaaaatttctgtatattccctgtggaatgtacctatgtgagtttcagaaattctcaaaatacgtgttcaaaaatttctgcttttgcatctttgggacacctcagaaaacttattaacaactgtgaatatgagaaatacagaagaaaataataagccctctatacataaatgcccagcacaattcattgttaaaaaacaaccaaacctcacactactgtatttcattatctgtactgaaagcaaatgctttgtgactattaaatgttgcacatcattcattcaaaaaaaaaaaaaaaaaaa

SEQ ID NO: 102 - DNA, 9870 bp, Homo sapiens
  modified_base (7138): a, t, c or g
gtaattgcgagcgagagtgagtggggccgggacccgcagagccgagccgacccttctctcccgggctgcggcagggcagggcggggagctccgcgcaccaacagagccggttctcagggcgctttgctccttgttttttccccggttctgttttctccccttctccggaaggcttgtcaaggggtaggagaaagagacgcaaacacaaaagtggaaaacagttaatgaccagccacggcgtccctgctgtgagctctggccgctgccttccagggctcccgagccacacgctgggggtgctggctgagggaacatggcttgttggcctcagctgaggttgctgctgtggaagaacctcactttcagaagaagacaaacatgtcagctgctgctggaagtggcctggcctctatttatcttcctgatcctgatctctgttcggctgagctacccaccctatgaacaacatgaatgccattttccaaataaagccatgccctctgcaggaacacttccttgggttcaggggattatctgtaatgccaacaacccctgtttccgttacccgactcctggggaggctcccggagttgttggaaactttaacaaatccattgtggctcgcctgttctcagatgctcggaggcttcttttatacagccagaaagacaccagcatgaaggacatgcgcaaagttctgagaacattacagcagatcaagaaatccagctcaaacttgaagcttcaagatttcctggtggacaatgaaaccttctctgggttcctgtatcacaacctctctctcccaaagtctactgtggacaagatgctgagggctgatgtcattctccacaaggtatttttgcaaggctaccagttacatttgacaagtctgtgcaatggatcaaaatcagaagagatgattcaacttggtgaccaagaagtttctgagctttgtggcctaccaagggagaaactggctgcagcagagcgagtacttcgttccaacatggacatcctgaagccaatcctgagaacactaaactctacatctcccttcccgagcaaggagctggccgaagccacaaaaacattgctgcatagtcttgggactctggcccaggagctgttcagcatgagaagctggagtgacatgcgacaggaggtgatgtttctgaccaatgtgaacagctccagctcctccacccaaatctaccaggctgtgtctcgtattgtctgcgggcatcccgagggaggggggctgaagatcaagtctctcaactggtatgaggacaacaactacaaagccctctttggaggcaatggcactgaggaagatgctgaaaccttctatgacaactctacaactccttactgcaatgatttgatgaagaatttggagtctagtcctctttcccgcattatctggaaagctctgaagccgctgctcgttgggaagatcctgtatacacctgacactccagccacaaggcaggtcatggctgaggtgaacaagaccttccaggaactggctgtgttccatgatctggaaggcatgtgggaggaactcagccccaagatctggaccttcatggagaacagccaagaaatggaccttgtccggatgctgttggacagcagggacaatgaccacttttgggaacagcagttggatggcttagattggacagcccaagacatcgtggcgtttttggccaagcacccagaggatgtccagtccagtaatggttctgtgtacacctggagagaagctttcaacgagactaaccaggcaatccggaccatatctcgcttcatggagtgtgtcaacctgaacaagctagaacccatagcaacagaagtctggctcatcaacaagtccatggagctgctggatgagaggaagttctgggctggtattgtgttcactggaattactccaggcagcattgagctgccccatcatgtcaagtacaagatccgaatggacattgacaatgtggagaggacaaataaaatcaaggatgggtactgggaccctggtcctcgagctgacccctttgaggacatgcggtacgtctgggggggcttcgcctacttgcaggatgtggtggagcaggcaatcatcagggtgctgacgggcaccgagaagaaaactggtgtctatatgcaacagatgccctatccctgttacgttgatgacatctttctgcgggtgatgagccggtcaatgcccctcttcatgacgctggcctggatttactcagtggctgtgatcatcaagggcatcgtgtatgagaaggaggcacggctgaaagagaccatgcggatcatgggcctggacaacagcatcctctggtttagctggttcattagtagcctcattcctcttcttgtgagcgctggcctgctagtggtcatcctgaagttaggaaacctgctgccctacagtgatcccagcgtggtgtttgtcttcctgtccgtgtttgctgtggtgacaatcctgcagtgcttcctgattagcacactcttctccagagccaacctggcagcagcctgtgggggcatcatctacttcacgctgtacctgccctacgtcctgtgtgtggcatggcaggactacatgggcttcacactcaagatcttcgctagcctgctgtctcctgtggcttttgggtttggctgtgagtactttgccctttttgaggagcagggcattggagtgcagtgggacaacctgtttgagagtcctgtggaggaagatggcttcaatctcaccacttcggtctccatgatgctgtttgacaccttcctctatggggtgatgacctggtacattgaggctgtctttccaggccagtacggaattcccaggccctggtattttccttgcaccaagtcctactggtttggcgaggaaagtgatgagaagagccaccctggttccaaccagaagagaatatcagaaatctgcatggaggaggaacccacccacttgaagctgggcgtgtccattcagaacctggtaaaagtctaccgagatgggatgaaggtggctgtcgatggcctggcactgaatttttatgagggccagatcacctccttcctgggccacaatggagcggggaagacgaccaccatgtcaatcctgaccgggttgttccccccgacctcgggcaccgcctacatcctgggaaaagacattcgctctgagatgagcaccatccggcagaacctgggggtctgtccccagcataacgtgctgtttgacatgctgactgtcgaagaacacatctggttctatgcccgcttgaaagggctctctgagaagcacgtgaaggcggagatggagcagatggccctggatgttggtttgccatcaagcaagctgaaaagcaaaacaagccagctgtcaggtggaatgcagagaaagctatctgtggccttggcctttgtcgggggatctaaggttgtcattctggatgaacccacagctggtgtggacccttactcccgcaggggaatatgggagctgctgctgaaataccgacaaggccgcaccattattctctctacacaccacatggatgaagcggacgtcctgggggacaggattgccatcatctcccatgggaagctgtgctgtgtgggctcctccctgtttctgaagaaccagctgggaacaggctactacctgaccttggtcaagaaagatgtggaatcctccctcagttcctgcagaaacagtagtagcactgtgtcatacctgaaaaaggaggacagtgtttctcagagcagttctgatgctggcctgggcagcgaccatgagagtgacacgctgaccatcgatgtctctgctatctccaacctcatcaggaagcatgtgtctgaagcccggctggtggaagacatagggcatgagctgacctatgtgctgccatatgaagctgctaaggagggagcctttgtggaactctttcatgagattgatgaccggctctcagacctgggcatttctagttatggcatctcagagacgaccctggaagaaatattcctcaaggtggccgaagagagtggggtggatgctgagacctcagatggtaccttgccagcaagacgaaacaggcgggccttcggggacaagcagagctgtcttcgcccgttcactgaagatgatgctgctgatccaaatgattctgacatagacccagaatccagagagacagacttgctcagtgggatggatggcaaagggtcctaccaggtgaaaggctggaaacttacacagcaacagtttgtggcccttttgtggaagagactgctaattgccagacggagtcggaaaggattttttgctcagattgtcttgccagctgtgtttgtctgcattgcccttgtgttcagcctgatcgtgccaccctttggcaagtaccccagcctggaacttcagccctggatgtacaacgaacagtacacatttgtcagcaatgatgctcctgaggacacgggaaccctggaactcttaaacgccctcaccaaagaccctggcttcgggacccgctgtatggaaggaaacccaatcccagacacgccctgccaggcaggggaggaagagtggaccactgccccagttccccagaccatcatggacctcttccagaatgggaactggacaatgcagaacccttcacctgcatgccagtgtagcagcgacaaaatcaagaagatgctgcctgtgtgtcccccaggggcaggggggctgcctcctccacaaagaaaacaaaacactgcagatatccttcaggacctgacaggaagaaacatttcggattatctggtgaagacgtatgtgcagatcatagccaaaagcttaaagaacaagatctgggtgaatgagtttaggtatggcggcttttccctgggtgtcagtaatactcaagcacttcctccgagtcaagaagttaatgatgccaccaaacaaatgaagaaacacctaaagctggccaaggacagttctgcagatcgatttctcaacagcttgggaagatttatgacaggactggacaccagaaataatgtcaaggtgtggttcaataacaagggctggcatgcaatcagctctttcctgaatgtcatcaacaatgccattctccgggccaacctgcaaaagggagagaaccctagccattatggaattactgctttcaatcatcccctgaatctcaccaagcagcagctctcagaggtggctccgatgaccacatcagtggatgtccttgtgtccatctgtgtcatctttgcaatgtccttcgtcccagccagctttgtcgtattcctgatccaggagcgggtcagcaaagcaaaacacctgcagttcatcagtggagtgaagcctgtcatctactggctctctaattttgtctgggatatgtgcaattacgttgtccctgccacactggtcattatcatcttcatctgcttccagcagaagtcctatgtgtcctccaccaatctgcctgtgctagcccttctacttttgctgtatgggtggtcaatcacacctctcatgtacccagcctcctttgtgttcaagatccccagcacagcctatgtggtgctcaccagcgtgaacctcttcattggcattaatggcagcgtggccacctttgtgctggagctgttcaccgacaataagctgaataatatcaatgatatcctgaagtccgtgttcttgatcttcccacatttttgcctgggacgagggctcatcgacatggtgaaaaaccaggcaatggctgatgccctggaaaggtttggggagaatcgctttgtgtcaccattatcttgggacttggtgggacgaaacctcttcgccatggccgtggaaggggtggtgttcttcctcattactgttctgatccagtacagattcttcatcaggcccagacctgtaaatgcaaagctatctcctctgaatgatgaagatgaagatgtgaggcgggaaagacagagaattcttgatggtggaggccagaatgacatcttagaaatcaaggagttgacgaagatatatagaaggaagcggaagcctgctgttgacaggatttgcgtgggcattcctcctggtgagtgctttgggctcctgggagttaatggggctggaaaatcatcaactttcaagatgttaacaggagataccactgttaccagaggagatgctttccttaacagaaatagtatcttatcaaacatccatgaagtacatcagaacatgggctactgccctcagtttgatgccatcacagagctgttgactgggagagaacacgtggagttctttgcccttttgagaggagtcccagagaaagaagttggcaaggttggtgagtgggcgattcggaaactgggcctcgtgaagtatggagaaaaatatgctggtaactatagtggaggcaacaaacgcaagctctctacagccatggctttgatcggcgggcctcctgtggtgtttctggatgaacccaccacaggcatggatcccaaagcccggcggttcttgtggaattgtgccctaagtgttgtcaaggaggggagatcagtagtgcttacatctcatagtatggaagaatgtgaagctctttgcactaggatggcaatcatggtcaatggaaggttcaggtgccttggcagtgtccagcatctaaaaaataggtttggagatggttatacaatagttgtacgaatagcagggtccaacccggacctgaagcctgtccaggatttctttggacttgcatttcctggaagtgttccaaaagagaaacaccggaacatgctacaataccagcttccatcttcattatcttctctggccaggatattcagcatcctctcccagagcaaaaagcgactccacatagaagactactctgtttctcagacaacacttgaccaagtatttgtgaactttgccaaggaccaaagtgatgatgaccacttaaaagacctctcattacacaaaaaccagacagtagtggacgttgcagttctcacatcttttctacaggatgagaaagtgaaagaaagctatgtatgaagaatcctgttcatacggggtggctgaaagtaaagaggnactagactttcctttgcaccatgtgaagtgttgtggagaaaagagccagaagttgatgtgggaagaagtaaactggatactgtactgatactattcaatgcaatgcaattcaatgcaatgaaaacaaaattccattacaggggcagtgcctttgtagcctatgtcttgtatggctctcaagtgaaagacttgaatttagttttttacctatacctatgtgaaactctattatggaacccaatggacatatgggtttgaactcacactttttttttttttttgttcctgtgtattctcattggggttgcaacaataattcatcaagtaatcatggccagcgattattgatcaaaatcaaaaggtaatgcacatcctcattcactaagccatgccatgcccaggagactggtttcccggtgacacatccattgctggcaatgagtgtgccagagttattagtgccaagtttttcagaaagtttgaagcaccatggtgtgtcatgctcacttttgtgaaagctgctctgctcagagtctatcaacattgaatatcagttgacagaatggtgccatgcgtggctaacatcctgctttgattccctctgataagctgttctggtggcagtaacatgcaacaaaaatgtgggtgtctctaggcacgggaaacttggttccattgttatattgtcctatgcttcgagccatgggtctacagggtcatccttatgagactcttaaatatacttagatcctggtaagaggcaaagaatcaacagccaaactgctggggctgcaagctgctgaagccagggcatgggattaaagagattgtgcgttcaaacctagggaagcctgtgcccatttgtcctgactgtctgctaacatggtacactgcatctcaagatgtttatctgacacaagtgtattatttctggctttttgaattaatctagaaaatgaaaagatggagttgtattttgacaaaaatgtttgtactttttaatgttatttggaattttaagttctatcagtgacttctgaatccttagaatggcctctttgtagaaccctgtggtatagaggagtatggccactgccccactatttttattttcttatgtaagtttgcatatcagtcatgactagtgcctagaaagcaatgtgatggtcaggatctcatgacattatatttgagtttctttcagatcatttaggatactcttaatctcacttcatcaatcaaatattttttgagtgtatgctgtagctgaaagagtatgtacgtacgtataagactagagagatattaagtctcagtacacttcctgtgccatgttattcagctcactggtttacaaatataggttgtcttgtggttgtaggagcccactgtaacaatactgggcagcctttttttttttttttaattgcaacaatgcaaaagccaagaaagtataagggtcacaagtctaaacaatgaattcttcaacagggaaaacagctagcttgaaaacttgctgaaaaacacaacttgtgtttatggcatttagtaccttcaaataattggctttgcagatattggataccccattaaatctgacagtctcaaatttttcatctcttcaatcactagtcaagaaaaatataaaaacaacaaatacttccatatggagcatttttcagagttttctaacccagtcttatttttctagtcagtaaacatttgtaaaaatactgtttcactaatacttactgttaactgtcttgagagaaaagaaaaatatgagagaactattgtttggggaagttcaagtgatctttcaatatcattactaacttcttccactttttccaaaatttgaatattaacgctaaaggtgtaagacttcagatttcaaattaatctttctatattttttaaatttacagaatattatataacccactgctgaaaaagaaaaaaatgattgttttagaagttaaagtcaatattgattttaaatataagtaatgaaggcatatttccaataactagtgatatggcatcgttgcattttacagtatcttcaaaaatacagaatttatagaataatttctcctcatttaatatttttcaaaatcaaagttatggtttcctcattttactaaaatcgtattctaattcttcattatagtaaatctatgagcaactccttacttcggttcctctgatttcaaggccatattttaaaaaatcaaaaggcactgtgaactattttgaagaaaacacaacattttaatacagattgaaaggacctcttctgaagctagaaacaatctatagttatacatcttcattaatactgtgttaccttttaaaatagtaattttttacattttcctgtgtaaacctaattgtggtagaaatttttaccaactctatactcaatcaagcaaaatttctgtatattccctgtggaatgtacctatgtgagtttcagaaattctcaaaatacgtgttcaaaaatttctgcttttgcatctttgggacacctcagaaaacttattaacaactgtgaatatgagaaatacagaagaaaataataagccctctatacataaatgcccagcacaattcattgttaaaaaacaaccaaacctcacactactgtatttcattatctgtactgaaagcaaatgctttgtgactattaaatgttgcacatcattcattcaaaaaaaaaaaaaaaaaaa

SEQ ID NO: 103 - DNA, 9870 bp, Homo sapiens
  modified_base (7138): a, t, c or g
gtaattgcgagcgagagtgagtggggccgggacccgcagagccgagccgacccttctctcccgggctgcggcagggcagggcggggagctccgcgcaccaacagagccggttctcagggcgctttgctccttgttttttccccggttctgttttctccccttctccggaaggcttgtcaaggggtaggagaaagagacgcaaacacaaaagtggaaaacagttaatgaccagccacggcgtccctgctgtgagctctggccgctgccttccagggctcccgagccacacgctgggggtgctggctgagggaacatggcttgttggcctcagctgaggttgctgctgtggaagaacctcactttcagaagaagacaaacatgtcagctgctgctggaagtggcctggcctctatttatcttcctgatcctgatctctgttcggctgagctacccaccctatgaacaacatgaatgccattttccaaataaagccatgccctctgcaggaacacttccttgggttcaggggattatctgtaatgccaacaacccctgtttccgttacccgactcctggggaggctcccggagttgttggaaactttaacaaatccattgtggctcgcctgttctcagatgctcggaggcttcttttatacagccagaaagacaccagcatgaaggacatgcgcaaagttctgagaacattacagcagatcaagaaatccagctcaaacttgaagcttcaagatttcctggtggacaatgaaaccttctctgggttcctgtatcacaacctctctctcccaaagtctactgtggacaagatgctgagggctgatgtcattctccacaaggtatttttgcaaggctaccagttacatttgacaagtctgtgcaatggatcaaaatcagaagagatgattcaacttggtgaccaagaagtttctgagctttgtggcctaccaagggagaaactggctgcagcagagcgagtacttcgttccaacatggacatcctgaagccaatcctgagaacactaaactctacatctcccttcccgagcaaggagctggccgaagccacaaaaacattgctgcatagtcttgggactctggcccaggagctgttcagcatgagaagctggagtgacatgcgacaggaggtgatgtttctgaccaatgtgaacagctccagctcctccacccaaatctaccaggctgtgtctcgtattgtctgcgggcatcccgagggaggggggctgaagatcaagtctctcaactggtatgaggacaacaactacaaagccctctttggaggcaatggcactgaggaagatgctgaaaccttctatgacaactctacaactccttactgcaatgatttgatgaagaatttggagtctagtcctctttcccgcattatctggaaagctctgaagccgctgctcgttgggaagatcctgtatacacctgacactccagccacaaggcaggtcatggctgaggtgaacaagaccttccaggaactggctgtgttccatgatctggaaggcatgtgggaggaactcagccccaagatctggaccttcatggagaacagccaagaaatggaccttgtccggatgctgttggacagcagggacaatgaccacttttgggaacagcagttggatggcttagattggacagcccaagacatcgtggcgtttttggccaagcacccagaggatgtccagtccagtaatggttctgtgtacacctggagagaagctttcaacgagactaaccaggcaatccggaccatatctcgcttcatggagtgtgtcaacctgaacaagctagaacccatagcaacagaagtctggctcatcaacaagtccatggagctgctggatgagaggaagttctgggctggtattgtgttcactggaattactccaggcagcattgagctgccccatcatgtcaagtacaagatccgaatggacattgacaatgtggagaggacaaataaaatcaaggatgggtactgggaccctggtcctcgagctgacccctttgaggacatgcggtacgtctgggggggcttcgcctacttgcaggatgtggtggagcaggcaatcatcagggtgctgacgggcaccgagaagaaaactggtgtctatatgcaacagatgccctatccctgttacgttgatgacatctttctgcgggtgatgagccggtcaatgcccctcttcatgacgctggcctggatttactcagtggctgtgatcatcaagggcatcgtgtatgagaaggaggcacggctgaaagagaccatgcggatcatgggcctggacaacagcatcctctggtttagctggttcattagtagcctcattcctcttcttgtgagcgctggcctgctagtggtcatcctgaagttaggaaacctgctgccctacagtgatcccagcgtggtgtttgtcttcctgtccgtgtttgctgtggtgacaatcctgcagtgcttcctgattagcacactcttctccagagccaacctggcagcagcctgtgggggcatcatctacttcacgctgtacctgccctacgtcctgtgtgtggcatggcaggactacgtgggcttcacactcaagatcttcgctagcctgctgtctcctgtggcttttgggtttggctgtgagtactttgccctttttgaggagcagggcattggagtgcagtgggacaacctgtttgagagtcctgtggaggaagatggcttcaatctcaccacttcgatctccatgatgctgtttgacaccttcctctatggggtgatgacctggtacattgaggctgtctttccaggccagtacggaattcccaggccctggtattttccttgcaccaagtcctactggtttggcgaggaaagtgatgagaagagccaccctggttccaaccagaagagaatatcagaaatctgcatggaggaggaacccacccacttgaagctgggcgtgtccattcagaacctggtaaaagtctaccgagatgggatgaaggtggctgtcgatggcctggcactgaatttttatgagggccagatcacctccttcctgggccacaatggagcggggaagacgaccaccatgtcaatcctgaccgggttgttccccccgacctcgggcaccgcctacatcctgggaaaagacattcgctctgagatgagcaccatccggcagaacctgggggtctgtccccagcataacgtgctgtttgacatgctgactgtcgaagaacacatctggttctatgcccgcttgaaagggctctctgagaagcacgtgaaggcggagatggagcagatggccctggatgttggtttgccatcaagcaagctgaaaagcaaaacaagccagctgtcaggtggaatgcagagaaagctatctgtggccttggcctttgtcgggggatctaaggttgtcattctggatgaacccacagctggtgtggacccttactcccgcaggggaatatgggagctgctgctgaaataccgacaaggccgcaccattattctctctacacaccacatggatgaagcggacgtcctgggggacaggattgccatcatctcccatgggaagctgtgctgtgtgggctcctccctgtttctgaagaaccagctgggaacaggctactacctgaccttggtcaagaaagatgtggaatcctccctcagttcctgcagaaacagtagtagcactgtgtcatacctgaaaaaggaggacagtgtttctcagagcagttctgatgctggcctgggcagcgaccatgagagtgacacgctgaccatcgatgtctctgctatctccaacctcatcaggaagcatgtgtctgaagcccggctggtggaagacatagggcatgagctgacctatgtgctgccatatgaagctgctaaggagggagcctttgtggaactctttcatgagattgatgaccggctctcagacctgggcatttctagttatggcatctcagagacgaccctggaagaaatattcctcaaggtggccgaagagagtggggtggatgctgagacctcagatggtaccttgccagcaagacgaaacaggcgggccttcggggacaagcagagctgtcttcgcccgttcactgaagatgatgctgctgatccaaatgattctgacatagacccagaatccagagagacagacttgctcagtgggatggatggcaaagggtcctaccaggtgaaaggctggaaacttacacagcaacagtttgtggcccttttgtggaagagactgctaattgccagacggagtcggaaaggattttttgctcagattgtcttgccagctgtgtttgtctgcattgcccttgtgttcagcctgatcgtgccaccctttggcaagtaccccagcctggaacttcagccctggatgtacaacgaacagtacacatttgtcagcaatgatgctcctgaggacacgggaaccctggaactcttaaacgccctcaccaaagaccctggcttcgggacccgctgtatggaaggaaacccaatcccagacacgccctgccaggcaggggaggaagagtggaccactgccccagttccccagaccatcatggacctcttccagaatgggaactggacaatgcagaacccttcacctgcatgccagtgtagcagcgacaaaatcaagaagatgctgcctgtgtgtcccccaggggcaggggggctgcctcctccacaaagaaaacaaaacactgcagatatccttcaggacctgacaggaagaaacatttcggattatctggtgaagacgtatgtgcagatcatagccaaaagcttaaagaacaagatctgggtgaatgagtttaggtatggcggcttttccctgggtgtcagtaatactcaagcacttcctccgagtcaagaagttaatgatgccaccaaacaaatgaagaaacacctaaagctggccaaggacagttctgcagatcgatttctcaacagcttgggaagatttatgacaggactggacaccagaaataatgtcaaggtgtggttcaataacaagggctggcatgcaatcagctctttcctgaatgtcatcaacaatgccattctccgggccaacctgcaaaagggagagaaccctagccattatggaattactgctttcaatcatcccctgaatctcaccaagcagcagctctcagaggtggctccgatgaccacatcagtggatgtccttgtgtccatctgtgtcatctttgcaatgtccttcgtcccagccagctttgtcgtattcctgatccaggagcgggtcagcaaagcaaaacacctgcagttcatcagtggagtgaagcctgtcatctactggctctctaattttgtctgggatatgtgcaattacgttgtccctgccacactggtcattatcatcttcatctgcttccagcagaagtcctatgtgtcctccaccaatctgcctgtgctagcccttctacttttgctgtatgggtggtcaatcacacctctcatgtacccagcctcctttgtgttcaagatccccagcacagcctatgtggtgctcaccagcgtgaacctcttcattggcattaatggcagcgtggccacctttgtgctggagctgttcaccgacaataagctgaataatatcaatgatatcctgaagtccgtgttcttgatcttcccacatttttgcctgggacgagggctcatcgacatggtgaaaaaccaggcaatggctgatgccctggaaaggtttggggagaatcgctttgtgtcaccattatcttgggacttggtgggacgaaacctcttcgccatggccgtggaaggggtggtgttcttcctcattactgttctgatccagtacagattcttcatcaggcccagacctgtaaatgcaaagctatctcctctgaatgatgaagatgaagatgtgaggcgggaaagacagagaattcttgatggtggaggccagaatgacatcttagaaatcaaggagttgacgaagatatatagaaggaagcggaagcctgctgttgacaggatttgcgtgggcattcctcctggtgagtgctttgggctcctgggagttaatggggctggaaaatcatcaactttcaagatgttaacaggagataccactgttaccagaggagatgctttccttaacagaaatagtatcttatcaaacatccatgaagtacatcagaacatgggctactgccctcagtttgatgccatcacagagctgttgactgggagagaacacgtggagttctttgcccttttgagaggagtcccagagaaagaagttggcaaggttggtgagtgggcgattcggaaactgggcctcgtgaagtatggagaaaaatatgctggtaactatagtggaggcaacaaacgcaagctctctacagccatggctttgatcggcgggcctcctgtggtgtttctggatgaacccaccacaggcatggatcccaaagcccggcggttcttgtggaattgtgccctaagtgttgtcaaggaggggagatcagtagtgcttacatctcatagtatggaagaatgtgaagctctttgcactaggatggcaatcatggtcaatggaaggttcaggtgccttggcagtgtccagcatctaaaaaataggtttggagatggttatacaatagttgtacgaatagcagggtccaacccggacctgaagcctgtccaggatttctttggacttgcatttcctggaagtgttccaaaagagaaacaccggaacatgctacaataccagcttccatcttcattatcttctctggccaggatattcagcatcctctcccagagcaaaaagcgactccacatagaagactactctgtttctcagacaacacttgaccaagtatttgtgaactttgccaaggaccaaagtgatgatgaccacttaaaagacctctcattacacaaaaaccagacagtagtggacgttgcagttctcacatcttttctacaggatgagaaagtgaaagaaagctatgtatgaagaatcctgttcatacggggtggctgaaagtaaagaggnactagactttcctttgcaccatgtgaagtgttgtggagaaaagagccagaagttgatgtgggaagaagtaaactggatactgtactgatactattcaatgcaatgcaattcaatgcaatgaaaacaaaattccattacaggggcagtgcctttgtagcctatgtcttgtatggctctcaagtgaaagacttgaatttagttttttacctatacctatgtgaaactctattatggaacccaatggacatatgggtttgaactcacactttttttttttttttgttcctgtgtattctcattggggttgcaacaataattcatcaagtaatcatggccagcgattattgatcaaaatcaaaaggtaatgcacatcctcattcactaagccatgccatgcccaggagactggtttcccggtgacacatccattgctggcaatgagtgtgccagagttattagtgccaagtttttcagaaagtttgaagcaccatggtgtgtcatgctcacttttgtgaaagctgctctgctcagagtctatcaacattgaatatcagttgacagaatggtgccatgcgtggctaacatcctgctttgattccctctgataagctgttctggtggcagtaacatgcaacaaaaatgtgggtgtctctaggcacgggaaacttggttccattgttatattgtcctatgcttcgagccatgggtctacagggtcatccttatgagactcttaaatatacttagatcctggtaagaggcaaagaatcaacagccaaactgctggggctgcaagctgctgaagccagggcatgggattaaagagattgtgcgttcaaacctagggaagcctgtgcccatttgtcctgactgtctgctaacatggtacactgcatctcaagatgtttatctgacacaagtgtattatttctggctttttgaattaatctagaaaatgaaaagatggagttgtattttgacaaaaatgtttgtactttttaatgttatttggaattttaagttctatcagtgacttctgaatccttagaatggcctctttgtagaaccctgtggtatagaggagtatggccactgccccactatttttattttcttatgtaagtttgcatatcagtcatgactagtgcctagaaagcaatgtgatggtcaggatctcatgacattatatttgagtttctttcagatcatttaggatactcttaatctcacttcatcaatcaaatattttttgagtgtatgctgtagctgaaagagtatgtacgtacgtataagactagagagatattaagtctcagtacacttcctgtgccatgttattcagctcactggtttacaaatataggttgtcttgtggttgtaggagcccactgtaacaatactgggcagcctttttttttttttttaattgcaacaatgcaaaagccaagaaagtataagggtcacaagtctaaacaatgaattcttcaacagggaaaacagctagcttgaaaacttgctgaaaaacacaacttgtgtttatggcatttagtaccttcaaataattggctttgcagatattggataccccattaaatctgacagtctcaaatttttcatctcttcaatcactagtcaagaaaaatataaaaacaacaaatacttccatatggagcatttttcagagttttctaacccagtcttatttttctagtcagtaaacatttgtaaaaatactgtttcactaatacttactgttaactgtcttgagagaaaagaaaaatatgagagaactattgtttggggaagttcaagtgatctttcaatatcattactaacttcttccactttttccaaaatttgaatattaacgctaaaggtgtaagacttcagatttcaaattaatctttctatattttttaaatttacagaatattatataacccactgctgaaaaagaaaaaaatgattgttttagaagttaaagtcaatattgattttaaatataagtaatgaaggcatatttccaataactagtgatatggcatcgttgcattttacagtatcttcaaaaatacagaatttatagaataatttctcctcatttaatatttttcaaaatcaaagttatggtttcctcattttactaaaatcgtattctaattcttcattatagtaaatctatgagcaactccttacttcggttcctctgatttcaaggccatattttaaaaaatcaaaaggcactgtgaactattttgaagaaaacacaacattttaatacagattgaaaggacctcttctgaagctagaaacaatctatagttatacatcttcattaatactgtgttaccttttaaaatagtaattttttacattttcctgtgtaaacctaattgtggtagaaatttttaccaactctatactcaatcaagcaaaatttctgtatattccctgtggaatgtacctatgtgagtttcagaaattctcaaaatacgtgttcaaaaatttctgcttttgcatctttgggacacctcagaaaacttattaacaactgtgaatatgagaaatacagaagaaaataataagccctctatacataaatgcccagcacaattcattgttaaaaaacaaccaaacctcacactactgtatttcattatctgtactgaaagcaaatgctttgtgactattaaatgttgcacatcattcattcaaaaaaaaaaaaaaaaaaa

SEQ ID NO: 104 - DNA, 9870 bp, Homo sapiens
  modified_base (7138): a, t, c or g
gtaattgcgagcgagagtgagtggggccgggacccgcagagccgagccgacccttctctcccgggctgcggcagggcagggcggggagctccgcgcaccaacagagccggttctcagggcgctttgctccttgttttttccccggttctgttttctccccttctccggaaggcttgtcaaggggtaggagaaagagacgcaaacacaaaagtggaaaacagttaatgaccagccacggcgtccctgctgtgagctctggccgctgccttccagggctcccgagccacacgctgggggtgctggctgagggaacatggcttgttggcctcagctgaggttgctgctgtggaagaacctcactttcagaagaagacaaacatgtcagctgctgctggaagtggcctggcctctatttatcttcctgatcctgatctctgttcggctgagctacccaccctatgaacaacatgaatgccattttccaaataaagccatgccctctgcaggaacacttccttgggttcaggggattatctgtaatgccaacaacccctgtttccgttacccgactcctggggaggctcccggagttgttggaaactttaacaaatccattgtggctcgcctgttctcagatgctcggaggcttcttttatacagccagaaagacaccagcatgaaggacatgcgcaaagttctgagaacattacagcagatcaagaaatccagctcaaacttgaagcttcaagatttcctggtggacaatgaaaccttctctgggttcctgtatcacaacctctctctcccaaagtctactgtggacaagatgctgagggctgatgtcattctccacaaggtatttttgcaaggctaccagttacatttgacaagtctgtgcaatggatcaaaatcagaagagatgattcaacttggtgaccaagaagtttctgagctttgtggcctaccaagggagaaactggctgcagcagagcgagtacttcgttccaacatggacatcctgaagccaatcctgagaacactaaactctacatctcccttcccgagcaaggagctggccgaagccacaaaaacattgctgcatagtcttgggactctggcccaggagctgttcagcatgagaagctggagtgacatgcgacaggaggtgatgtttctgaccaatgtgaacagctccagctcctccacccaaatctaccaggctgtgtctcgtattgtctgcgggcatcccgagggaggggggctgaagatcaagtctctcaactggtatgaggacaacaactacaaagccctctttggaggcaatggcactgaggaagatgctgaaaccttctatgacaactctacaactccttactgcaatgatttgatgaagaatttggagtctagtcctctttcccgcattatctggaaagctctgaagccgctgctcgttgggaagatcctgtatacacctgacactccagccacaaggcaggtcatggctgaggtgaacaagaccttccaggaactggctgtgttccatgatctggaaggcatgtgggaggaactcagccccaagatctggaccttcatggagaacagccaagaaatggaccttgtccggatgctgttggacagcagggacaatgaccacttttgggaacagcagttggatggcttagattggacagcccaagacatcgtggcgtttttggccaagcacccagaggatgtccagtccagtaatggttctgtgtacacctggagagaagctttcaacgagactaaccaggcaatccggaccatatctcgcttcatggagtgtgtcaacctgaacaagctagaacccatagcaacagaagtctggctcatcaacaagtccatggagctgctggatgagaggaagttctgggctggtattgtgttcactggaattactccaggcagcattgagctgccccatcatgtcaagtacaagatccgaatggacattgacaatgtggagaggacaaataaaatcaaggatgggtactgggaccctggtcctcgagctgacccctttgaggacatgcggtacgtctgggggggcttcgcctacttgcaggatgtggtggagcaggcaatcatcagggtgctgacgggcaccgagaagaaaactggtgtctatatgcaacagatgccctatccctgttacgttgatgacatctttctgcgggtgatgagccggtcaatgcccctcttcatgacgctggcctggatttactcagtggctgtgatcatcaagggcatcgtgtatgagaaggaggcacggctgaaagagaccatgcggatcatgggcctggacaacagcatcctctggtttagctggttcattagtagcctcattcctcttcttgtgagcgctggcctgctagtggtcatcctgaagttaggaaacctgctgccctacagtgatcccagcgtggtgtttgtcttcctgtccgtgtttgctgtggtgacaatcctgcagtgcttcctgattagcacactcttctccagagccaacctggcagcagcctgtgggggcatcatctacttcacgctgtacctgccctacgtcctgtgtgtggcatggcaggactacgtgggcttcacactcaagatcttcgctagcctgctgtctcctgtggcttttgggtttggctgtgagtactttgccctttttgaggagcagggcattggagtgcagtgggacaacctgtttgagagtcctgtggaggaagatggcttcaatctcaccacttcggtctccatgatgctgtttgacaccttcctctatggggtgatgacctggtacattgaggctgtctttccaggccagtacggaattcccaggccctggcattttccttgcaccaagtcctactggtttggcgaggaaagtgatgagaagagccaccctggttccaaccagaagagaatatcagaaatctgcatggaggaggaacccacccacttgaagctgggcgtgtccattcagaacctggtaaaagtctaccgagatgggatgaaggtggctgtcgatggcctggcactgaatttttatgagggccagatcacctccttcctgggccacaatggagcggggaagacgaccaccatgtcaatcctgaccgggttgttccccccgacctcgggcaccgcctacatcctgggaaaagacattcgctctgagatgagcaccatccggcagaacctgggggtctgtccccagcataacgtgctgtttgacatgctgactgtcgaagaacacatctggttctatgcccgcttgaaagggctctctgagaagcacgtgaaggcggagatggagcagatggccctggatgttggtttgccatcaagcaagctgaaaagcaaaacaagccagctgtcaggtggaatgcagagaaagctatctgtggccttggcctttgtcgggggatctaaggttgtcattctggatgaacccacagctggtgtggacccttactcccgcaggggaatatgggagctgctgctgaaataccgacaaggccgcaccattattctctctacacaccacatggatgaagcggacgtcctgggggacaggattgccatcatctcccatgggaagctgtgctgtgtgggctcctccctgtttctgaagaaccagctgggaacaggctactacctgaccttggtcaagaaagatgtggaatcctccctcagttcctgcagaaacagtagtagcactgtgtcatacctgaaaaaggaggacagtgtttctcagagcagttctgatgctggcctgggcagcgaccatgagagtgacacgctgaccatcgatgtctctgctatctccaacctcatcaggaagcatgtgtctgaagcccggctggtggaagacatagggcatgagctgacctatgtgctgccatatgaagctgctaaggagggagcctttgtggaactctttcatgagattgatgaccggctctcagacctgggcatttctagttatggcatctcagagacgaccctggaagaaatattcctcaaggtggccgaagagagtggggtggatgctgagacctcagatggtaccttgccagcaagacgaaacaggcgggccttcggggacaagcagagctgtcttcgcccgttcactgaagatgatgctgctgatccaaatgattctgacatagacccagaatccagagagacagacttgctcagtgggatggatggcaaagggtcctaccaggtgaaaggctggaaacttacacagcaacagtttgtggcccttttgtggaagagactgctaattgccagacggagtcggaaaggattttttgctcagattgtcttgccagctgtgtttgtctgcattgcccttgtgttcagcctgatcgtgccaccctttggcaagtaccccagcctggaacttcagccctggatgtacaacgaacagtacacatttgtcagcaatgatgctcctgaggacacgggaaccctggaactcttaaacgccctcaccaaagaccctggcttcgggacccgctgtatggaaggaaacccaatcccagacacgccctgccaggcaggggaggaagagtggaccactgccccagttccccagaccatcatggacctcttccagaatgggaactggacaatgcagaacccttcacctgcatgccagtgtagcagcgacaaaatcaagaagatgctgcctgtgtgtcccccaggggcaggggggctgcctcctccacaaagaaaacaaaacactgcagatatccttcaggacctgacaggaagaaacatttcggattatctggtgaagacgtatgtgcagatcatagccaaaagcttaaagaacaagatctgggtgaatgagtttaggtatggcggcttttccctgggtgtcagtaatactcaagcacttcctccgagtcaagaagttaatgatgccaccaaacaaatgaagaaacacctaaagctggccaaggacagttctgcagatcgatttctcaacagcttgggaagatttatgacaggactggacaccagaaataatgtcaaggtgtggttcaataacaagggctggcatgcaatcagctctttcctgaatgtcatcaacaatgccattctccgggccaacctgcaaaagggagagaaccctagccattatggaattactgctttcaatcatcccctgaatctcaccaagcagcagctctcagaggtggctccgatgaccacatcagtggatgtccttgtgtccatctgtgtcatctttgcaatgtccttcgtcccagccagctttgtcgtattcctgatccaggagcgggtcagcaaagcaaaacacctgcagttcatcagtggagtgaagcctgtcatctactggctctctaattttgtctgggatatgtgcaattacgttgtccctgccacactggtcattatcatcttcatctgcttccagcagaagtcctatgtgtcctccaccaatctgcctgtgctagcccttctacttttgctgtatgggtggtcaatcacacctctcatgtacccagcctcctttgtgttcaagatccccagcacagcctatgtggtgctcaccagcgtgaacctcttcattggcattaatggcagcgtggccacctttgtgctggagctgttcaccgacaataagctgaataatatcaatgatatcctgaagtccgtgttcttgatcttcccacatttttgcctgggacgagggctcatcgacatggtgaaaaaccaggcaatggctgatgccctggaaaggtttggggagaatcgctttgtgtcaccattatcttgggacttggtgggacgaaacctcttcgccatggccgtggaaggggtggtgttcttcctcattactgttctgatccagtacagattcttcatcaggcccagacctgtaaatgcaaagctatctcctctgaatgatgaagatgaagatgtgaggcgggaaagacagagaattcttgatggtggaggccagaatgacatcttagaaatcaaggagttgacgaagatatatagaaggaagcggaagcctgctgttgacaggatttgcgtgggcattcctcctggtgagtgctttgggctcctgggagttaatggggctggaaaatcatcaactttcaagatgttaacaggagataccactgttaccagaggagatgctttccttaacagaaatagtatcttatcaaacatccatgaagtacatcagaacatgggctactgccctcagtttgatgccatcacagagctgttgactgggagagaacacgtggagttctttgcccttttgagaggagtcccagagaaagaagttggcaaggttggtgagtgggcgattcggaaactgggcctcgtgaagtatggagaaaaatatgctggtaactatagtggaggcaacaaacgcaagctctctacagccatggctttgatcggcgggcctcctgtggtgtttctggatgaacccaccacaggcatggatcccaaagcccggcggttcttgtggaattgtgccctaagtgttgtcaaggaggggagatcagtagtgcttacatctcatagtatggaagaatgtgaagctctttgcactaggatggcaatcatggtcaatggaaggttcaggtgccttggcagtgtccagcatctaaaaaataggtttggagatggttatacaatagttgtacgaatagcagggtccaacccggacctgaagcctgtccaggatttctttggacttgcatttcctggaagtgttccaaaagagaaacaccggaacatgctacaataccagcttccatcttcattatcttctctggccaggatattcagcatcctctcccagagcaaaaagcgactccacatagaagactactctgtttctcagacaacacttgaccaagtatttgtgaactttgccaaggaccaaagtgatgatgaccacttaaaagacctctcattacacaaaaaccagacagtagtggacgttgcagttctcacatcttttctacaggatgagaaagtgaaagaaagctatgtatgaagaatcctgttcatacggggtggctgaaagtaaagaggnactagactttcctttgcaccatgtgaagtgttgtggagaaaagagccagaagttgatgtgggaagaagtaaactggatactgtactgatactattcaatgcaatgcaattcaatgcaatgaaaacaaaattccattacaggggcagtgcctttgtagcctatgtcttgtatggctctcaagtgaaagacttgaatttagttttttacctatacctatgtgaaactctattatggaacccaatggacatatgggtttgaactcacactttttttttttttttgttcctgtgtattctcattggggttgcaacaataattcatcaagtaatcatggccagcgattattgatcaaaatcaaaaggtaatgcacatcctcattcactaagccatgccatgcccaggagactggtttcccggtgacacatccattgctggcaatgagtgtgccagagttattagtgccaagtttttcagaaagtttgaagcaccatggtgtgtcatgctcacttttgtgaaagctgctctgctcagagtctatcaacattgaatatcagttgacagaatggtgccatgcgtggctaacatcctgctttgattccctctgataagctgttctggtggcagtaacatgcaacaaaaatgtgggtgtctctaggcacgggaaacttggttccattgttatattgtcctatgcttcgagccatgggtctacagggtcatccttatgagactcttaaatatacttagatcctggtaagaggcaaagaatcaacagccaaactgctggggctgcaagctgctgaagccagggcatgggattaaagagattgtgcgttcaaacctagggaagcctgtgcccatttgtcctgactgtctgctaacatggtacactgcatctcaagatgtttatctgacacaagtgtattatttctggctttttgaattaatctagaaaatgaaaagatggagttgtattttgacaaaaatgtttgtactttttaatgttatttggaattttaagttctatcagtgacttctgaatccttagaatggcctctttgtagaaccctgtggtatagaggagtatggccactgccccactatttttattttcttatgtaagtttgcatatcagtcatgactagtgcctagaaagcaatgtgatggtcaggatctcatgacattatatttgagtttctttcagatcatttaggatactcttaatctcacttcatcaatcaaatattttttgagtgtatgctgtagctgaaagagtatgtacgtacgtataagactagagagatattaagtctcagtacacttcctgtgccatgttattcagctcactggtttacaaatataggttgtcttgtggttgtaggagcccactgtaacaatactgggcagcctttttttttttttttaattgcaacaatgcaaaagccaagaaagtataagggtcacaagtctaaacaatgaattcttcaacagggaaaacagctagcttgaaaacttgctgaaaaacacaacttgtgtttatggcatttagtaccttcaaataattggctttgcagatattggataccccattaaatctgacagtctcaaatttttcatctcttcaatcactagtcaagaaaaatataaaaacaacaaatacttccatatggagcatttttcagagttttctaacccagtcttatttttctagtcagtaaacatttgtaaaaatactgtttcactaatacttactgttaactgtcttgagagaaaagaaaaatatgagagaactattgtttggggaagttcaagtgatctttcaatatcattactaacttcttccactttttccaaaatttgaatattaacgctaaaggtgtaagacttcagatttcaaattaatctttctatattttttaaatttacagaatattatataacccactgctgaaaaagaaaaaaatgattgttttagaagttaaagtcaatattgattttaaatataagtaatgaaggcatatttccaataactagtgatatggcatcgttgcattttacagtatcttcaaaaatacagaatttatagaataatttctcctcatttaatatttttcaaaatcaaagttatggtttcctcattttactaaaatcgtattctaattcttcattatagtaaatctatgagcaactccttacttcggttcctctgatttcaaggccatattttaaaaaatcaaaaggcactgtgaactattttgaagaaaacacaacattttaatacagattgaaaggacctcttctgaagctagaaacaatctatagttatacatcttcattaatactgtgttaccttttaaaatagtaattttttacattttcctgtgtaaacctaattgtggtagaaatttttaccaactctatactcaatcaagcaaaatttctgtatattccctgtggaatgtacctatgtgagtttcagaaattctcaaaatacgtgttcaaaaatttctgcttttgcatctttgggacacctcagaaaacttattaacaactgtgaatatgagaaatacagaagaaaataataagccctctatacataaatgcccagcacaattcattgttaaaaaacaaccaaacctcacactactgtatttcattatctgtactgaaagcaaatgctttgtgactattaaatgttgcacatcattcattcaaaaaaaaaaaaaaaaaaa

SEQ ID NO: 105 - DNA, 9870 bp, Homo sapiens
  modified_base (7138): a, t, c or g
gtaattgcgagcgagagtgagtggggccgggacccgcagagccgagccgacccttctctcccgggctgcggcagggcagggcggggagctccgcgcaccaacagagccggttctcagggcgctttgctccttgttttttccccggttctgttttctccccttctccggaaggcttgtcaaggggtaggagaaagagacgcaaacacaaaagtggaaaacagttaatgaccagccacggcgtccctgctgtgagctctggccgctgccttccagggctcccgagccacacgctgggggtgctggctgagggaacatggcttgttggcctcagctgaggttgctgctgtggaagaacctcactttcagaagaagacaaacatgtcagctgctgctggaagtggcctggcctctatttatcttcctgatcctgatctctgttcggctgagctacccaccctatgaacaacatgaatgccattttccaaataaagccatgccctctgcaggaacacttccttgggttcaggggattatctgtaatgccaacaacccctgtttccgttacccgactcctggggaggctcccggagttgttggaaactttaacaaatccattgtggctcgcctgttctcagatgctcggaggcttcttttatacagccagaaagacaccagcatgaaggacatgcgcaaagttctgagaacattacagcagatcaagaaatccagctcaaacttgaagcttcaagatttcctggtggacaatgaaaccttctctgggttcctgtatcacaacctctctctcccaaagtctactgtggacaagatgctgagggctgatgtcattctccacaaggtatttttgcaaggctaccagttacatttgacaagtctgtgcaatggatcaaaatcagaagagatgattcaacttggtgaccaagaagtttctgagctttgtggcctaccaagggagaaactggctgcagcagagcgagtacttcgttccaacatggacatcctgaagccaatcctgagaacactaaactctacatctcccttcccgagcaaggagctggccgaagccacaaaaacattgctgcatagtcttgggactctggcccaggagctgttcagcatgagaagctggagtgacatgcgacaggaggtgatgtttctgaccaatgtgaacagctccagctcctccacccaaatctaccaggctgtgtctcgtattgtctgcgggcatcccgagggaggggggctgaagatcaagtctctcaactggtatgaggacaacaactacaaagccctctttggaggcaatggcactgaggaagatgctgaaaccttctatgacaactctacaactccttactgcaatgatttgatgaagaatttggagtctagtcctctttcccgcattatctggaaagctctgaagccgctgctcgttgggaagatcctgtatacacctgacactccagccacaaggcaggtcatggctgaggtgaacaagaccttccaggaactggctgtgttccatgatctggaaggcatgtgggaggaactcagccccaagatctggaccttcatggagaacagccaagaaatggaccttgtccggatgctgttggacagcagggacaatgaccacttttgggaacagcagttggatggcttagattggacagcccaagacatcgtggcgtttttggccaagcacccagaggatgtccagtccagtaatggttctgtgtacacctggagagaagctttcaacgagactaaccaggcaatccggaccatatctcgcttcatggagtgtgtcaacctgaacaagctagaacccatagcaacagaagtctggctcatcaacaagtccatggagctgctggatgagaggaagttctgggctggtattgtgttcactggaattactccaggcagcattgagctgccccatcatgtcaagtacaagatccgaatggacattgacaatgtggagaggacaaataaaatcaaggatgggtactgggaccctggtcctcgagctgacccctttgaggacatgcggtacgtctgggggggcttcgcctacttgcaggatgtggtggagcaggcaatcatcagggtgctgacgggcaccgagaagaaaactggtgtctatatgcaacagatgccctatccctgttacgttgatgacatctttctgcgggtgatgagccggtcaatgcccctcttcatgacgctggcctggatttactcagtggctgtgatcatcaagggcatcgtgtatgagaaggaggcacggctgaaagagaccatgcggatcatgggcctggacaacagcatcctctggtttagctggttcattagtagcctcattcctcttcttgtgagcgctggcctgctagtggtcatcctgaagttaggaaacctgctgccctacagtgatcccagcgtggtgtttgtcttcctgtccgtgtttgctgtggtgacaatcctgcagtgcttcctgattagcacactcttctccagagccaacctggcagcagcctgtgggggcatcatctacttcacgctgtacctgccctacgtcctgtgtgtggcatggcaggactacgtgggcttcacactcaagatcttcgctagcctgctgtctcctgtggcttttgggtttggctgtgagtactttgccctttttgaggagcagggcattggagtgcagtgggacaacctgtttgagagtcctgtggaggaagatggcttcaatctcaccacttcggtctccatgatgctgtttgacaccttcctctatggggtgatgacctggtacattgaggctgtctttccaggccagtacggaattcccaggccctggtattttccttgcaccaagtcctactggtttggcgaggaaagtgatgagaagagccaccctggttccaaccagaagagaatgtcagaaatctgcatggaggaggaacccacccacttgaagctgggcgtgtccattcagaacctggtaaaagtctaccgagatgggatgaaggtggctgtcgatggcctggcactgaatttttatgagggccagatcacctccttcctgggccacaatggagcggggaagacgaccaccatgtcaatcctgaccgggttgttccccccgacctcgggcaccgcctacatcctgggaaaagacattcgctctgagatgagcaccatccggcagaacctgggggtctgtccccagcataacgtgctgtttgacatgctgactgtcgaagaacacatctggttctatgcccgcttgaaagggctctctgagaagcacgtgaaggcggagatggagcagatggccctggatgttggtttgccatcaagcaagctgaaaagcaaaacaagccagctgtcaggtggaatgcagagaaagctatctgtggccttggcctttgtcgggggatctaaggttgtcattctggatgaacccacagctggtgtggacccttactcccgcaggggaatatgggagctgctgctgaaataccgacaaggccgcaccattattctctctacacaccacatggatgaagcggacgtcctgggggacaggattgccatcatctcccatgggaagctgtgctgtgtgggctcctccctgtttctgaagaaccagctgggaacaggctactacctgaccttggtcaagaaagatgtggaatcctccctcagttcctgcagaaacagtagtagcactgtgtcatacctgaaaaaggaggacagtgtttctcagagcagttctgatgctggcctgggcagcgaccatgagagtgacacgctgaccatcgatgtctctgctatctccaacctcatcaggaagcatgtgtctgaagcccggctggtggaagacatagggcatgagctgacctatgtgctgccatatgaagctgctaaggagggagcctttgtggaactctttcatgagattgatgaccggctctcagacctgggcatttctagttatggcatctcagagacgaccctggaagaaatattcctcaaggtggccgaagagagtggggtggatgctgagacctcagatggtaccttgccagcaagacgaaacaggcgggccttcggggacaagcagagctgtcttcgcccgttcactgaagatgatgctgctgatccaaatgattctgacatagacccagaatccagagagacagacttgctcagtgggatggatggcaaagggtcctaccaggtgaaaggctggaaacttacacagcaacagtttgtggcccttttgtggaagagactgctaattgccagacggagtcggaaaggattttttgctcagattgtcttgccagctgtgtttgtctgcattgcccttgtgttcagcctgatcgtgccaccctttggcaagtaccccagcctggaacttcagccctggatgtacaacgaacagtacacatttgtcagcaatgatgctcctgaggacacgggaaccctggaactcttaaacgccctcaccaaagaccctggcttcgggacccgctgtatggaaggaaacccaatcccagacacgccctgccaggcaggggaggaagagtggaccactgccccagttccccagaccatcatggacctcttccagaatgggaactggacaatgcagaacccttcacctgcatgccagtgtagcagcgacaaaatcaagaagatgctgcctgtgtgtcccccaggggcaggggggctgcctcctccacaaagaaaacaaaacactgcagatatccttcaggacctgacaggaagaaacatttcggattatctggtgaagacgtatgtgcagatcatagccaaaagcttaaagaacaagatctgggtgaatgagtttaggtatggcggcttttccctgggtgtcagtaatactcaagcacttcctccgagtcaagaagttaatgatgccaccaaacaaatgaagaaacacctaaagctggccaaggacagttctgcagatcgatttctcaacagcttgggaagatttatgacaggactggacaccagaaataatgtcaaggtgtggttcaataacaagggctggcatgcaatcagctctttcctgaatgtcatcaacaatgccattctccgggccaacctgcaaaagggagagaaccctagccattatggaattactgctttcaatcatcccctgaatctcaccaagcagcagctctcagaggtggctccgatgaccacatcagtggatgtccttgtgtccatctgtgtcatctttgcaatgtccttcgtcccagccagctttgtcgtattcctgatccaggagcgggtcagcaaagcaaaacacctgcagttcatcagtggagtgaagcctgtcatctactggctctctaattttgtctgggatatgtgcaattacgttgtccctgccacactggtcattatcatcttcatctgcttccagcagaagtcctatgtgtcctccaccaatctgcctgtgctagcccttctacttttgctgtatgggtggtcaatcacacctctcatgtacccagcctcctttgtgttcaagatccccagcacagcctatgtggtgctcaccagcgtgaacctcttcattggcattaatggcagcgtggccacctttgtgctggagctgttcaccgacaataagctgaataatatcaatgatatcctgaagtccgtgttcttgatcttcccacatttttgcctgggacgagggctcatcgacatggtgaaaaaccaggcaatggctgatgccctggaaaggtttggggagaatcgctttgtgtcaccattatcttgggacttggtgggacgaaacctcttcgccatggccgtggaaggggtggtgttcttcctcattactgttctgatccagtacagattcttcatcaggcccagacctgtaaatgcaaagctatctcctctgaatgatgaagatgaagatgtgaggcgggaaagacagagaattcttgatggtggaggccagaatgacatcttagaaatcaaggagttgacgaagatatatagaaggaagcggaagcctgctgttgacaggatttgcgtgggcattcctcctggtgagtgctttgggctcctgggagttaatggggctggaaaatcatcaactttcaagatgttaacaggagataccactgttaccagaggagatgctttccttaacagaaatagtatcttatcaaacatccatgaagtacatcagaacatgggctactgccctcagtttgatgccatcacagagctgttgactgggagagaacacgtggagttctttgcccttttgagaggagtcccagagaaagaagttggcaaggttggtgagtgggcgattcggaaactgggcctcgtgaagtatggagaaaaatatgctggtaactatagtggaggcaacaaacgcaagctctctacagccatggctttgatcggcgggcctcctgtggtgtttctggatgaacccaccacaggcatggatcccaaagcccggcggttcttgtggaattgtgccctaagtgttgtcaaggaggggagatcagtagtgcttacatctcatagtatggaagaatgtgaagctctttgcactaggatggcaatcatggtcaatggaaggttcaggtgccttggcagtgtccagcatctaaaaaataggtttggagatggttatacaatagttgtacgaatagcagggtccaacccggacctgaagcctgtccaggatttctttggacttgcatttcctggaagtgttccaaaagagaaacaccggaacatgctacaataccagcttccatcttcattatcttctctggccaggatattcagcatcctctcccagagcaaaaagcgactccacatagaagactactctgtttctcagacaacacttgaccaagtatttgtgaactttgccaaggaccaaagtgatgatgaccacttaaaagacctctcattacacaaaaaccagacagtagtggacgttgcagttctcacatcttttctacaggatgagaaagtgaaagaaagctatgtatgaagaatcctgttcatacggggtggctgaaagtaaagaggnactagactttcctttgcaccatgtgaagtgttgtggagaaaagagccagaagttgatgtgggaagaagtaaactggatactgtactgatactattcaatgcaatgcaattcaatgcaatgaaaacaaaattccattacaggggcagtgcctttgtagcctatgtcttgtatggctctcaagtgaaagacttgaatttagttttttacctatacctatgtgaaactctattatggaacccaatggacatatgggtttgaactcacactttttttttttttttgttcctgtgtattctcattggggttgcaacaataattcatcaagtaatcatggccagcgattattgatcaaaatcaaaaggtaatgcacatcctcattcactaagccatgccatgcccaggagactggtttcccggtgacacatccattgctggcaatgagtgtgccagagttattagtgccaagtttttcagaaagtttgaagcaccatggtgtgtcatgctcacttttgtgaaagctgctctgctcagagtctatcaacattgaatatcagttgacagaatggtgccatgcgtggctaacatcctgctttgattccctctgataagctgttctggtggcagtaacatgcaacaaaaatgtgggtgtctctaggcacgggaaacttggttccattgttatattgtcctatgcttcgagccatgggtctacagggtcatccttatgagactcttaaatatacttagatcctggtaagaggcaaagaatcaacagccaaactgctggggctgcaagctgctgaagccagggcatgggattaaagagattgtgcgttcaaacctagggaagcctgtgcccatttgtcctgactgtctgctaacatggtacactgcatctcaagatgtttatctgacacaagtgtattatttctggctttttgaattaatctagaaaatgaaaagatggagttgtattttgacaaaaatgtttgtactttttaatgttatttggaattttaagttctatcagtgacttctgaatccttagaatggcctctttgtagaaccctgtggtatagaggagtatggccactgccccactatttttattttcttatgtaagtttgcatatcagtcatgactagtgcctagaaagcaatgtgatggtcaggatctcatgacattatatttgagtttctttcagatcatttaggatactcttaatctcacttcatcaatcaaatattttttgagtgtatgctgtagctgaaagagtatgtacgtacgtataagactagagagatattaagtctcagtacacttcctgtgccatgttattcagctcactggtttacaaatataggttgtcttgtggttgtaggagcccactgtaacaatactgggcagcctttttttttttttttaattgcaacaatgcaaaagccaagaaagtataagggtcacaagtctaaacaatgaattcttcaacagggaaaacagctagcttgaaaacttgctgaaaaacacaacttgtgtttatggcatttagtaccttcaaataattggctttgcagatattggataccccattaaatctgacagtctcaaatttttcatctcttcaatcactagtcaagaaaaatataaaaacaacaaatacttccatatggagcatttttcagagttttctaacccagtcttatttttctagtcagtaaacatttgtaaaaatactgtttcactaatacttactgttaactgtcttgagagaaaagaaaaatatgagagaactattgtttggggaagttcaagtgatctttcaatatcattactaacttcttccactttttccaaaatttgaatattaacgctaaaggtgtaagacttcagatttcaaattaatctttctatattttttaaatttacagaatattatataacccactgctgaaaaagaaaaaaatgattgttttagaagttaaagtcaatattgattttaaatataagtaatgaaggcatatttccaataactagtgatatggcatcgttgcattttacagtatcttcaaaaatacagaatttatagaataatttctcctcatttaatatttttcaaaatcaaagttatggtttcctcattttactaaaatcgtattctaattcttcattatagtaaatctatgagcaactccttacttcggttcctctgatttcaaggccatattttaaaaaatcaaaaggcactgtgaactattttgaagaaaacacaacattttaatacagattgaaaggacctcttctgaagctagaaacaatctatagttatacatcttcattaatactgtgttaccttttaaaatagtaattttttacattttcctgtgtaaacctaattgtggtagaaatttttaccaactctatactcaatcaagcaaaatttctgtatattccctgtggaatgtacctatgtgagtttcagaaattctcaaaatacgtgttcaaaaatttctgcttttgcatctttgggacacctcagaaaacttattaacaactgtgaatatgagaaatacagaagaaaataataagccctctatacataaatgcccagcacaattcattgttaaaaaacaaccaaacctcacactactgtatttcattatctgtactgaaagcaaatgctttgtgactattaaatgttgcacatcattcattcaaaaaaaaaaaaaaaaaaa

SEQ ID NO: 106 - DNA, 9870 bp, Homo sapiens
  modified_base (7138): a, t, c or g
gtaattgcgagcgagagtgagtggggccgggacccgcagagccgagccgacccttctctcccgggctgcggcagggcagggcggggagctccgcgcaccaacagagccggttctcagggcgctttgctccttgttttttccccggttctgttttctccccttctccggaaggcttgtcaaggggtaggagaaagagacgcaaacacaaaagtggaaaacagttaatgaccagccacggcgtccctgctgtgagctctggccgctgccttccagggctcccgagccacacgctgggggtgctggctgagggaacatggcttgttggcctcagctgaggttgctgctgtggaagaacctcactttcagaagaagacaaacatgtcagctgctgctggaagtggcctggcctctatttatcttcctgatcctgatctctgttcggctgagctacccaccctatgaacaacatgaatgccattttccaaataaagccatgccctctgcaggaacacttccttgggttcaggggattatctgtaatgccaacaacccctgtttccgttacccgactcctggggaggctcccggagttgttggaaactttaacaaatccattgtggctcgcctgttctcagatgctcggaggcttcttttatacagccagaaagacaccagcatgaaggacatgcgcaaagttctgagaacattacagcagatcaagaaatccagctcaaacttgaagcttcaagatttcctggtggacaatgaaaccttctctgggttcctgtatcacaacctctctctcccaaagtctactgtggacaagatgctgagggctgatgtcattctccacaaggtatttttgcaaggctaccagttacatttgacaagtctgtgcaatggatcaaaatcagaagagatgattcaacttggtgaccaagaagtttctgagctttgtggcctaccaagggagaaactggctgcagcagagcgagtacttcgttccaacatggacatcctgaagccaatcctgagaacactaaactctacatctcccttcccgagcaaggagctggccgaagccacaaaaacattgctgcatagtcttgggactctggcccaggagctgttcagcatgagaagctggagtgacatgcgacaggaggtgatgtttctgaccaatgtgaacagctccagctcctccacccaaatctaccaggctgtgtctcgtattgtctgcgggcatcccgagggaggggggctgaagatcaagtctctcaactggtatgaggacaacaactacaaagccctctttggaggcaatggcactgaggaagatgctgaaaccttctatgacaactctacaactccttactgcaatgatttgatgaagaatttggagtctagtcctctttcccgcattatctggaaagctctgaagccgctgctcgttgggaagatcctgtatacacctgacactccagccacaaggcaggtcatggctgaggtgaacaagaccttccaggaactggctgtgttccatgatctggaaggcatgtgggaggaactcagccccaagatctggaccttcatggagaacagccaagaaatggaccttgtccggatgctgttggacagcagggacaatgaccacttttgggaacagcagttggatggcttagattggacagcccaagacatcgtggcgtttttggccaagcacccagaggatgtccagtccagtaatggttctgtgtacacctggagagaagctttcaacgagactaaccaggcaatccggaccatatctcgcttcatggagtgtgtcaacctgaacaagctagaacccatagcaacagaagtctggctcatcaacaagtccatggagctgctggatgagaggaagttctgggctggtattgtgttcactggaattactccaggcagcattgagctgccccatcatgtcaagtacaagatccgaatggacattgacaatgtggagaggacaaataaaatcaaggatgggtactgggaccctggtcctcgagctgacccctttgaggacatgcggtacgtctgggggggcttcgcctacttgcaggatgtggtggagcaggcaatcatcagggtgctgacgggcaccgagaagaaaactggtgtctatatgcaacagatgccctatccctgttacgttgatgacatctttctgcgggtgatgagccggtcaatgcccctcttcatgacgctggcctggatttactcagtggctgtgatcatcaagggcatcgtgtatgagaaggaggcacggctgaaagagaccatgcggatcatgggcctggacaacagcatcctctggtttagctggttcattagtagcctcattcctcttcttgtgagcgctggcctgctagtggtcatcctgaagttaggaaacctgctgccctacagtgatcccagcgtggtgtttgtcttcctgtccgtgtttgctgtggtgacaatcctgcagtgcttcctgattagcacactcttctccagagccaacctggcagcagcctgtgggggcatcatctacttcacgctgtacctgccctacgtcctgtgtgtggcatggcaggactacgtgggcttcacactcaagatcttcgctagcctgctgtctcctgtggcttttgggtttggctgtgagtactttgccctttttgaggagcagggcattggagtgcagtgggacaacctgtttgagagtcctgtggaggaagatggcttcaatctcaccacttcggtctccatgatgctgtttgacaccttcctctatggggtgatgacctggtacattgaggctgtctttccaggccagtacggaattcccaggccctggtattttccttgcaccaagtcctactggtttggcgaggaaagtgatgagaagagccaccctggttccaaccagaagagaatatcagaaatcttcatggaggaggaacccacccacttgaagctgggcgtgtccattcagaacctggtaaaagtctaccgagatgggatgaaggtggctgtcgatggcctggcactgaatttttatgagggccagatcacctccttcctgggccacaatggagcggggaagacgaccaccatgtcaatcctgaccgggttgttccccccgacctcgggcaccgcctacatcctgggaaaagacattcgctctgagatgagcaccatccggcagaacctgggggtctgtccccagcataacgtgctgtttgacatgctgactgtcgaagaacacatctggttctatgcccgcttgaaagggctctctgagaagcacgtgaaggcggagatggagcagatggccctggatgttggtttgccatcaagcaagctgaaaagcaaaacaagccagctgtcaggtggaatgcagagaaagctatctgtggccttggcctttgtcgggggatctaaggttgtcattctggatgaacccacagctggtgtggacccttactcccgcaggggaatatgggagctgctgctgaaataccgacaaggccgcaccattattctctctacacaccacatggatgaagcggacgtcctgggggacaggattgccatcatctcccatgggaagctgtgctgtgtgggctcctccctgtttctgaagaaccagctgggaacaggctactacctgaccttggtcaagaaagatgtggaatcctccctcagttcctgcagaaacagtagtagcactgtgtcatacctgaaaaaggaggacagtgtttctcagagcagttctgatgctggcctgggcagcgaccatgagagtgacacgctgaccatcgatgtctctgctatctccaacctcatcaggaagcatgtgtctgaagcccggctggtggaagacatagggcatgagctgacctatgtgctgccatatgaagctgctaaggagggagcctttgtggaactctttcatgagattgatgaccggctctcagacctgggcatttctagttatggcatctcagagacgaccctggaagaaatattcctcaaggtggccgaagagagtggggtggatgctgagacctcagatggtaccttgccagcaagacgaaacaggcgggccttcggggacaagcagagctgtcttcgcccgttcactgaagatgatgctgctgatccaaatgattctgacatagacccagaatccagagagacagacttgctcagtgggatggatggcaaagggtcctaccaggtgaaaggctggaaacttacacagcaacagtttgtggcccttttgtggaagagactgctaattgccagacggagtcggaaaggattttttgctcagattgtcttgccagctgtgtttgtctgcattgcccttgtgttcagcctgatcgtgccaccctttggcaagtaccccagcctggaacttcagccctggatgtacaacgaacagtacacatttgtcagcaatgatgctcctgaggacacgggaaccctggaactcttaaacgccctcaccaaagaccctggcttcgggacccgctgtatggaaggaaacccaatcccagacacgccctgccaggcaggggaggaagagtggaccactgccccagttccccagaccatcatggacctcttccagaatgggaactggacaatgcagaacccttcacctgcatgccagtgtagcagcgacaaaatcaagaagatgctgcctgtgtgtcccccaggggcaggggggctgcctcctccacaaagaaaacaaaacactgcagatatccttcaggacctgacaggaagaaacatttcggattatctggtgaagacgtatgtgcagatcatagccaaaagcttaaagaacaagatctgggtgaatgagtttaggtatggcggcttttccctgggtgtcagtaatactcaagcacttcctccgagtcaagaagttaatgatgccaccaaacaaatgaagaaacacctaaagctggccaaggacagttctgcagatcgatttctcaacagcttgggaagatttatgacaggactggacaccagaaataatgtcaaggtgtggttcaataacaagggctggcatgcaatcagctctttcctgaatgtcatcaacaatgccattctccgggccaacctgcaaaagggagagaaccctagccattatggaattactgctttcaatcatcccctgaatctcaccaagcagcagctctcagaggtggctccgatgaccacatcagtggatgtccttgtgtccatctgtgtcatctttgcaatgtccttcgtcccagccagctttgtcgtattcctgatccaggagcgggtcagcaaagcaaaacacctgcagttcatcagtggagtgaagcctgtcatctactggctctctaattttgtctgggatatgtgcaattacgttgtccctgccacactggtcattatcatcttcatctgcttccagcagaagtcctatgtgtcctccaccaatctgcctgtgctagcccttctacttttgctgtatgggtggtcaatcacacctctcatgtacccagcctcctttgtgttcaagatccccagcacagcctatgtggtgctcaccagcgtgaacctcttcattggcattaatggcagcgtggccacctttgtgctggagctgttcaccgacaataagctgaataatatcaatgatatcctgaagtccgtgttcttgatcttcccacatttttgcctgggacgagggctcatcgacatggtgaaaaaccaggcaatggctgatgccctggaaaggtttggggagaatcgctttgtgtcaccattatcttgggacttggtgggacgaaacctcttcgccatggccgtggaaggggtggtgttcttcctcattactgttctgatccagtacagattcttcatcaggcccagacctgtaaatgcaaagctatctcctctgaatgatgaagatgaagatgtgaggcgggaaagacagagaattcttgatggtggaggccagaatgacatcttagaaatcaaggagttgacgaagatatatagaaggaagcggaagcctgctgttgacaggatttgcgtgggcattcctcctggtgagtgctttgggctcctgggagttaatggggctggaaaatcatcaactttcaagatgttaacaggagataccactgttaccagaggagatgctttccttaacagaaatagtatcttatcaaacatccatgaagtacatcagaacatgggctactgccctcagtttgatgccatcacagagctgttgactgggagagaacacgtggagttctttgcccttttgagaggagtcccagagaaagaagttggcaaggttggtgagtgggcgattcggaaactgggcctcgtgaagtatggagaaaaatatgctggtaactatagtggaggcaacaaacgcaagctctctacagccatggctttgatcggcgggcctcctgtggtgtttctggatgaacccaccacaggcatggatcccaaagcccggcggttcttgtggaattgtgccctaagtgttgtcaaggaggggagatcagtagtgcttacatctcatagtatggaagaatgtgaagctctttgcactaggatggcaatcatggtcaatggaaggttcaggtgccttggcagtgtccagcatctaaaaaataggtttggagatggttatacaatagttgtacgaatagcagggtccaacccggacctgaagcctgtccaggatttctttggacttgcatttcctggaagtgttccaaaagagaaacaccggaacatgctacaataccagcttccatcttcattatcttctctggccaggatattcagcatcctctcccagagcaaaaagcgactccacatagaagactactctgtttctcagacaacacttgaccaagtatttgtgaactttgccaaggaccaaagtgatgatgaccacttaaaagacctctcattacacaaaaaccagacagtagtggacgttgcagttctcacatcttttctacaggatgagaaagtgaaagaaagctatgtatgaagaatcctgttcatacggggtggctgaaagtaaagaggnactagactttcctttgcaccatgtgaagtgttgtggagaaaagagccagaagttgatgtgggaagaagtaaactggatactgtactgatactattcaatgcaatgcaattcaatgcaatgaaaacaaaattccattacaggggcagtgcctttgtagcctatgtcttgtatggctctcaagtgaaagacttgaatttagttttttacctatacctatgtgaaactctattatggaacccaatggacatatgggtttgaactcacactttttttttttttttgttcctgtgtattctcattggggttgcaacaataattcatcaagtaatcatggccagcgattattgatcaaaatcaaaaggtaatgcacatcctcattcactaagccatgccatgcccaggagactggtttcccggtgacacatccattgctggcaatgagtgtgccagagttattagtgccaagtttttcagaaagtttgaagcaccatggtgtgtcatgctcacttttgtgaaagctgctctgctcagagtctatcaacattgaatatcagttgacagaatggtgccatgcgtggctaacatcctgctttgattccctctgataagctgttctggtggcagtaacatgcaacaaaaatgtgggtgtctctaggcacgggaaacttggttccattgttatattgtcctatgcttcgagccatgggtctacagggtcatccttatgagactcttaaatatacttagatcctggtaagaggcaaagaatcaacagccaaactgctggggctgcaagctgctgaagccagggcatgggattaaagagattgtgcgttcaaacctagggaagcctgtgcccatttgtcctgactgtctgctaacatggtacactgcatctcaagatgtttatctgacacaagtgtattatttctggctttttgaattaatctagaaaatgaaaagatggagttgtattttgacaaaaatgtttgtactttttaatgttatttggaattttaagttctatcagtgacttctgaatccttagaatggcctctttgtagaaccctgtggtatagaggagtatggccactgccccactatttttattttcttatgtaagtttgcatatcagtcatgactagtgcctagaaagcaatgtgatggtcaggatctcatgacattatatttgagtttctttcagatcatttaggatactcttaatctcacttcatcaatcaaatattttttgagtgtatgctgtagctgaaagagtatgtacgtacgtataagactagagagatattaagtctcagtacacttcctgtgccatgttattcagctcactggtttacaaatataggttgtcttgtggttgtaggagcccactgtaacaatactgggcagcctttttttttttttttaattgcaacaatgcaaaagccaagaaagtataagggtcacaagtctaaacaatgaattcttcaacagggaaaacagctagcttgaaaacttgctgaaaaacacaacttgtgtttatggcatttagtaccttcaaataattggctttgcagatattggataccccattaaatctgacagtctcaaatttttcatctcttcaatcactagtcaagaaaaatataaaaacaacaaatacttccatatggagcatttttcagagttttctaacccagtcttatttttctagtcagtaaacatttgtaaaaatactgtttcactaatacttactgttaactgtcttgagagaaaagaaaaatatgagagaactattgtttggggaagttcaagtgatctttcaatatcattactaacttcttccactttttccaaaatttgaatattaacgctaaaggtgtaagacttcagatttcaaattaatctttctatattttttaaatttacagaatattatataacccactgctgaaaaagaaaaaaatgattgttttagaagttaaagtcaatattgattttaaatataagtaatgaaggcatatttccaataactagtgatatggcatcgttgcattttacagtatcttcaaaaatacagaatttatagaataatttctcctcatttaatatttttcaaaatcaaagttatggtttcctcattttactaaaatcgtattctaattcttcattatagtaaatctatgagcaactccttacttcggttcctctgatttcaaggccatattttaaaaaatcaaaaggcactgtgaactattttgaagaaaacacaacattttaatacagattgaaaggacctcttctgaagctagaaacaatctatagttatacatcttcattaatactgtgttaccttttaaaatagtaattttttacattttcctgtgtaaacctaattgtggtagaaatttttaccaactctatactcaatcaagcaaaatttctgtatattccctgtggaatgtacctatgtgagtttcagaaattctcaaaatacgtgttcaaaaatttctgcttttgcatctttgggacacctcagaaaacttattaacaactgtgaatatgagaaatacagaagaaaataataagccctctatacataaatgcccagcacaattcattgttaaaaaacaaccaaacctcacactactgtatttcattatctgtactgaaagcaaatgctttgtgactattaaatgttgcacatcattcattcaaaaaaaaaaaaaaaaaaa

SEQ ID NO: 107 - DNA, 9870 bp, Homo sapiens
  modified_base (7138): a, t, c or g
gtaattgcgagcgagagtgagtggggccgggacccgcagagccgagccgacccttctctcccgggctgcggcagggcagggcggggagctccgcgcaccaacagagccggttctcagggcgctttgctccttgttttttccccggttctgttttctccccttctccggaaggcttgtcaaggggtaggagaaagagacgcaaacacaaaagtggaaaacagttaatgaccagccacggcgtccctgctgtgagctctggccgctgccttccagggctcccgagccacacgctgggggtgctggctgagggaacatggcttgttggcctcagctgaggttgctgctgtggaagaacctcactttcagaagaagacaaacatgtcagctgctgctggaagtggcctggcctctatttatcttcctgatcctgatctctgttcggctgagctacccaccctatgaacaacatgaatgccattttccaaataaagccatgccctctgcaggaacacttccttgggttcaggggattatctgtaatgccaacaacccctgtttccgttacccgactcctggggaggctcccggagttgttggaaactttaacaaatccattgtggctcgcctgttctcagatgctcggaggcttcttttatacagccagaaagacaccagcatgaaggacatgcgcaaagttctgagaacattacagcagatcaagaaatccagctcaaacttgaagcttcaagatttcctggtggacaatgaaaccttctctgggttcctgtatcacaacctctctctcccaaagtctactgtggacaagatgctgagggctgatgtcattctccacaaggtatttttgcaaggctaccagttacatttgacaagtctgtgcaatggatcaaaatcagaagagatgattcaacttggtgaccaagaagtttctgagctttgtggcctaccaagggagaaactggctgcagcagagcgagtacttcgttccaacatggacatcctgaagccaatcctgagaacactaaactctacatctcccttcccgagcaaggagctggccgaagccacaaaaacattgctgcatagtcttgggactctggcccaggagctgttcagcatgagaagctggagtgacatgcgacaggaggtgatgtttctgaccaatgtgaacagctccagctcctccacccaaatctaccaggctgtgtctcgtattgtctgcgggcatcccgagggaggggggctgaagatcaagtctctcaactggtatgaggacaacaactacaaagccctctttggaggcaatggcactgaggaagatgctgaaaccttctatgacaactctacaactccttactgcaatgatttgatgaagaatttggagtctagtcctctttcccgcattatctggaaagctctgaagccgctgctcgttgggaagatcctgtatacacctgacactccagccacaaggcaggtcatggctgaggtgaacaagaccttccaggaactggctgtgttccatgatctggaaggcatgtgggaggaactcagccccaagatctggaccttcatggagaacagccaagaaatggaccttgtccggatgctgttggacagcagggacaatgaccacttttgggaacagcagttggatggcttagattggacagcccaagacatcgtggcgtttttggccaagcacccagaggatgtccagtccagtaatggttctgtgtacacctggagagaagctttcaacgagactaaccaggcaatccggaccatatctcgcttcatggagtgtgtcaacctgaacaagctagaacccatagcaacagaagtctggctcatcaacaagtccatggagctgctggatgagaggaagttctgggctggtattgtgttcactggaattactccaggcagcattgagctgccccatcatgtcaagtacaagatccgaatggacattgacaatgtggagaggacaaataaaatcaaggatgggtactgggaccctggtcctcgagctgacccctttgaggacatgcggtacgtctgggggggcttcgcctacttgcaggatgtggtggagcaggcaatcatcagggtgctgacgggcaccgagaagaaaactggtgtctatatgcaacagatgccctatccctgttacgttgatgacatctttctgcgggtgatgagccggtcaatgcccctcttcatgacgctggcctggatttactcagtggctgtgatcatcaagggcatcgtgtatgagaaggaggcacggctgaaagagaccatgcggatcatgggcctggacaacagcatcctctggtttagctggttcattagtagcctcattcctcttcttgtgagcgctggcctgctagtggtcatcctgaagttaggaaacctgctgccctacagtgatcccagcgtggtgtttgtcttcctgtccgtgtttgctgtggtgacaatcctgcagtgcttcctgattagcacactcttctccagagccaacctggcagcagcctgtgggggcatcatctacttcacgctgtacctgccctacgtcctgtgtgtggcatggcaggactacgtgggcttcacactcaagatcttcgctagcctgctgtctcctgtggcttttgggtttggctgtgagtactttgccctttttgaggagcagggcattggagtgcagtgggacaacctgtttgagagtcctgtggaggaagatggcttcaatctcaccacttcggtctccatgatgctgtttgacaccttcctctatggggtgatgacctggtacattgaggctgtctttccaggccagtacggaattcccaggccctggtattttccttgcaccaagtcctactggtttggcgaggaaagtgatgagaagagccaccctggttccaaccagaagagaatatcagaaatctgcatggaggaggaacccacccacttgaagctgggcgtgtccattcagaacctggtaaaagtctaccgagatgggatgaaggtggctgtcgatggcctggcactgaatttttatgagggccagatcacctccttcctgggccacaatggagcggggaagacgaccaccatgtcaatcctgaccgggttgttccccccgacctcgggcactgcctacatcctgggaaaagacattcgctctgagatgagcaccatccggcagaacctgggggtctgtccccagcataacgtgctgtttgacatgctgactgtcgaagaacacatctggttctatgcccgcttgaaagggctctctgagaagcacgtgaaggcggagatggagcagatggccctggatgttggtttgccatcaagcaagctgaaaagcaaaacaagccagctgtcaggtggaatgcagagaaagctatctgtggccttggcctttgtcgggggatctaaggttgtcattctggatgaacccacagctggtgtggacccttactcccgcaggggaatatgggagctgctgctgaaataccgacaaggccgcaccattattctctctacacaccacatggatgaagcggacgtcctgggggacaggattgccatcatctcccatgggaagctgtgctgtgtgggctcctccctgtttctgaagaaccagctgggaacaggctactacctgaccttggtcaagaaagatgtggaatcctccctcagttcctgcagaaacagtagtagcactgtgtcatacctgaaaaaggaggacagtgtttctcagagcagttctgatgctggcctgggcagcgaccatgagagtgacacgctgaccatcgatgtctctgctatctccaacctcatcaggaagcatgtgtctgaagcccggctggtggaagacatagggcatgagctgacctatgtgctgccatatgaagctgctaaggagggagcctttgtggaactctttcatgagattgatgaccggctctcagacctgggcatttctagttatggcatctcagagacgaccctggaagaaatattcctcaaggtggccgaagagagtggggtggatgctgagacctcagatggtaccttgccagcaagacgaaacaggcgggccttcggggacaagcagagctgtcttcgcccgttcactgaagatgatgctgctgatccaaatgattctgacatagacccagaatccagagagacagacttgctcagtgggatggatggcaaagggtcctaccaggtgaaaggctggaaacttacacagcaacagtttgtggcccttttgtggaagagactgctaattgccagacggagtcggaaaggattttttgctcagattgtcttgccagctgtgtttgtctgcattgcccttgtgttcagcctgatcgtgccaccctttggcaagtaccccagcctggaacttcagccctggatgtacaacgaacagtacacatttgtcagcaatgatgctcctgaggacacgggaaccctggaactcttaaacgccctcaccaaagaccctggcttcgggacccgctgtatggaaggaaacccaatcccagacacgccctgccaggcaggggaggaagagtggaccactgccccagttccccagaccatcatggacctcttccagaatgggaactggacaatgcagaacccttcacctgcatgccagtgtagcagcgacaaaatcaagaagatgctgcctgtgtgtcccccaggggcaggggggctgcctcctccacaaagaaaacaaaacactgcagatatccttcaggacctgacaggaagaaacatttcggattatctggtgaagacgtatgtgcagatcatagccaaaagcttaaagaacaagatctgggtgaatgagtttaggtatggcggcttttccctgggtgtcagtaatactcaagcacttcctccgagtcaagaagttaatgatgccaccaaacaaatgaagaaacacctaaagctggccaaggacagttctgcagatcgatttctcaacagcttgggaagatttatgacaggactggacaccagaaataatgtcaaggtgtggttcaataacaagggctggcatgcaatcagctctttcctgaatgtcatcaacaatgccattctccgggccaacctgcaaaagggagagaaccctagccattatggaattactgctttcaatcatcccctgaatctcaccaagcagcagctctcagaggtggctccgatgaccacatcagtggatgtccttgtgtccatctgtgtcatctttgcaatgtccttcgtcccagccagctttgtcgtattcctgatccaggagcgggtcagcaaagcaaaacacctgcagttcatcagtggagtgaagcctgtcatctactggctctctaattttgtctgggatatgtgcaattacgttgtccctgccacactggtcattatcatcttcatctgcttccagcagaagtcctatgtgtcctccaccaatctgcctgtgctagcccttctacttttgctgtatgggtggtcaatcacacctctcatgtacccagcctcctttgtgttcaagatccccagcacagcctatgtggtgctcaccagcgtgaacctcttcattggcattaatggcagcgtggccacctttgtgctggagctgttcaccgacaataagctgaataatatcaatgatatcctgaagtccgtgttcttgatcttcccacatttttgcctgggacgagggctcatcgacatggtgaaaaaccaggcaatggctgatgccctggaaaggtttggggagaatcgctttgtgtcaccattatcttgggacttggtgggacgaaacctcttcgccatggccgtggaaggggtggtgttcttcctcattactgttctgatccagtacagattcttcatcaggcccagacctgtaaatgcaaagctatctcctctgaatgatgaagatgaagatgtgaggcgggaaagacagagaattcttgatggtggaggccagaatgacatcttagaaatcaaggagttgacgaagatatatagaaggaagcggaagcctgctgttgacaggatttgcgtgggcattcctcctggtgagtgctttgggctcctgggagttaatggggctggaaaatcatcaactttcaagatgttaacaggagataccactgttaccagaggagatgctttccttaacagaaatagtatcttatcaaacatccatgaagtacatcagaacatgggctactgccctcagtttgatgccatcacagagctgttgactgggagagaacacgtggagttctttgcccttttgagaggagtcccagagaaagaagttggcaaggttggtgagtgggcgattcggaaactgggcctcgtgaagtatggagaaaaatatgctggtaactatagtggaggcaacaaacgcaagctctctacagccatggctttgatcggcgggcctcctgtggtgtttctggatgaacccaccacaggcatggatcccaaagcccggcggttcttgtggaattgtgccctaagtgttgtcaaggaggggagatcagtagtgcttacatctcatagtatggaagaatgtgaagctctttgcactaggatggcaatcatggtcaatggaaggttcaggtgccttggcagtgtccagcatctaaaaaataggtttggagatggttatacaatagttgtacgaatagcagggtccaacccggacctgaagcctgtccaggatttctttggacttgcatttcctggaagtgttccaaaagagaaacaccggaacatgctacaataccagcttccatcttcattatcttctctggccaggatattcagcatcctctcccagagcaaaaagcgactccacatagaagactactctgtttctcagacaacacttgaccaagtatttgtgaactttgccaaggaccaaagtgatgatgaccacttaaaagacctctcattacacaaaaaccagacagtagtggacgttgcagttctcacatcttttctacaggatgagaaagtgaaagaaagctatgtatgaagaatcctgttcatacggggtggctgaaagtaaagaggnactagactttcctttgcaccatgtgaagtgttgtggagaaaagagccagaagttgatgtgggaagaagtaaactggatactgtactgatactattcaatgcaatgcaattcaatgcaatgaaaacaaaattccattacaggggcagtgcctttgtagcctatgtcttgtatggctctcaagtgaaagacttgaatttagttttttacctatacctatgtgaaactctattatggaacccaatggacatatgggtttgaactcacactttttttttttttttgttcctgtgtattctcattggggttgcaacaataattcatcaagtaatcatggccagcgattattgatcaaaatcaaaaggtaatgcacatcctcattcactaagccatgccatgcccaggagactggtttcccggtgacacatccattgctggcaatgagtgtgccagagttattagtgccaagtttttcagaaagtttgaagcaccatggtgtgtcatgctcacttttgtgaaagctgctctgctcagagtctatcaacattgaatatcagttgacagaatggtgccatgcgtggctaacatcctgctttgattccctctgataagctgttctggtggcagtaacatgcaacaaaaatgtgggtgtctctaggcacgggaaacttggttccattgttatattgtcctatgcttcgagccatgggtctacagggtcatccttatgagactcttaaatatacttagatcctggtaagaggcaaagaatcaacagccaaactgctggggctgcaagctgctgaagccagggcatgggattaaagagattgtgcgttcaaacctagggaagcctgtgcccatttgtcctgactgtctgctaacatggtacactgcatctcaagatgtttatctgacacaagtgtattatttctggctttttgaattaatctagaaaatgaaaagatggagttgtattttgacaaaaatgtttgtactttttaatgttatttggaattttaagttctatcagtgacttctgaatccttagaatggcctctttgtagaaccctgtggtatagaggagtatggccactgccccactatttttattttcttatgtaagtttgcatatcagtcatgactagtgcctagaaagcaatgtgatggtcaggatctcatgacattatatttgagtttctttcagatcatttaggatactcttaatctcacttcatcaatcaaatattttttgagtgtatgctgtagctgaaagagtatgtacgtacgtataagactagagagatattaagtctcagtacacttcctgtgccatgttattcagctcactggtttacaaatataggttgtcttgtggttgtaggagcccactgtaacaatactgggcagcctttttttttttttttaattgcaacaatgcaaaagccaagaaagtataagggtcacaagtctaaacaatgaattcttcaacagggaaaacagctagcttgaaaacttgctgaaaaacacaacttgtgtttatggcatttagtaccttcaaataattggctttgcagatattggataccccattaaatctgacagtctcaaatttttcatctcttcaatcactagtcaagaaaaatataaaaacaacaaatacttccatatggagcatttttcagagttttctaacccagtcttatttttctagtcagtaaacatttgtaaaaatactgtttcactaatacttactgttaactgtcttgagagaaaagaaaaatatgagagaactattgtttggggaagttcaagtgatctttcaatatcattactaacttcttccactttttccaaaatttgaatattaacgctaaaggtgtaagacttcagatttcaaattaatctttctatattttttaaatttacagaatattatataacccactgctgaaaaagaaaaaaatgattgttttagaagttaaagtcaatattgattttaaatataagtaatgaaggcatatttccaataactagtgatatggcatcgttgcattttacagtatcttcaaaaatacagaatttatagaataatttctcctcatttaatatttttcaaaatcaaagttatggtttcctcattttactaaaatcgtattctaattcttcattatagtaaatctatgagcaactccttacttcggttcctctgatttcaaggccatattttaaaaaatcaaaaggcactgtgaactattttgaagaaaacacaacattttaatacagattgaaaggacctcttctgaagctagaaacaatctatagttatacatcttcattaatactgtgttaccttttaaaatagtaattttttacattttcctgtgtaaacctaattgtggtagaaatttttaccaactctatactcaatcaagcaaaatttctgtatattccctgtggaatgtacctatgtgagtttcagaaattctcaaaatacgtgttcaaaaatttctgcttttgcatctttgggacacctcagaaaacttattaacaactgtgaatatgagaaatacagaagaaaataataagccctctatacataaatgcccagcacaattcattgttaaaaaacaaccaaacctcacactactgtatttcattatctgtactgaaagcaaatgctttgtgactattaaatgttgcacatcattcattcaaaaaaaaaaaaaaaaaaa

SEQ ID NO: 108 - DNA, 9870 bp, Homo sapiens
  modified_base (7138): a, t, c or g
gtaattgcgagcgagagtgagtggggccgggacccgcagagccgagccgacccttctctcccgggctgcggcagggcagggcggggagctccgcgcaccaacagagccggttctcagggcgctttgctccttgttttttccccggttctgttttctccccttctccggaaggcttgtcaaggggtaggagaaagagacgcaaacacaaaagtggaaaacagttaatgaccagccacggcgtccctgctgtgagctctggccgctgccttccagggctcccgagccacacgctgggggtgctggctgagggaacatggcttgttggcctcagctgaggttgctgctgtggaagaacctcactttcagaagaagacaaacatgtcagctgctgctggaagtggcctggcctctatttatcttcctgatcctgatctctgttcggctgagctacccaccctatgaacaacatgaatgccattttccaaataaagccatgccctctgcaggaacacttccttgggttcaggggattatctgtaatgccaacaacccctgtttccgttacccgactcctggggaggctcccggagttgttggaaactttaacaaatccattgtggctcgcctgttctcagatgctcggaggcttcttttatacagccagaaagacaccagcatgaaggacatgcgcaaagttctgagaacattacagcagatcaagaaatccagctcaaacttgaagcttcaagatttcctggtggacaatgaaaccttctctgggttcctgtatcacaacctctctctcccaaagtctactgtggacaagatgctgagggctgatgtcattctccacaaggtatttttgcaaggctaccagttacatttgacaagtctgtgcaatggatcaaaatcagaagagatgattcaacttggtgaccaagaagtttctgagctttgtggcctaccaagggagaaactggctgcagcagagcgagtacttcgttccaacatggacatcctgaagccaatcctgagaacactaaactctacatctcccttcccgagcaaggagctggccgaagccacaaaaacattgctgcatagtcttgggactctggcccaggagctgttcagcatgagaagctggagtgacatgcgacaggaggtgatgtttctgaccaatgtgaacagctccagctcctccacccaaatctaccaggctgtgtctcgtattgtctgcgggcatcccgagggaggggggctgaagatcaagtctctcaactggtatgaggacaacaactacaaagccctctttggaggcaatggcactgaggaagatgctgaaaccttctatgacaactctacaactccttactgcaatgatttgatgaagaatttggagtctagtcctctttcccgcattatctggaaagctctgaagccgctgctcgttgggaagatcctgtatacacctgacactccagccacaaggcaggtcatggctgaggtgaacaagaccttccaggaactggctgtgttccatgatctggaaggcatgtgggaggaactcagccccaagatctggaccttcatggagaacagccaagaaatggaccttgtccggatgctgttggacagcagggacaatgaccacttttgggaacagcagttggatggcttagattggacagcccaagacatcgtggcgtttttggccaagcacccagaggatgtccagtccagtaatggttctgtgtacacctggagagaagctttcaacgagactaaccaggcaatccggaccatatctcgcttcatggagtgtgtcaacctgaacaagctagaacccatagcaacagaagtctggctcatcaacaagtccatggagctgctggatgagaggaagttctgggctggtattgtgttcactggaattactccaggcagcattgagctgccccatcatgtcaagtacaagatccgaatggacattgacaatgtggagaggacaaataaaatcaaggatgggtactgggaccctggtcctcgagctgacccctttgaggacatgcggtacgtctgggggggcttcgcctacttgcaggatgtggtggagcaggcaatcatcagggtgctgacgggcaccgagaagaaaactggtgtctatatgcaacagatgccctatccctgttacgttgatgacatctttctgcgggtgatgagccggtcaatgcccctcttcatgacgctggcctggatttactcagtggctgtgatcatcaagggcatcgtgtatgagaaggaggcacggctgaaagagaccatgcggatcatgggcctggacaacagcatcctctggtttagctggttcattagtagcctcattcctcttcttgtgagcgctggcctgctagtggtcatcctgaagttaggaaacctgctgccctacagtgatcccagcgtggtgtttgtcttcctgtccgtgtttgctgtggtgacaatcctgcagtgcttcctgattagcacactcttctccagagccaacctggcagcagcctgtgggggcatcatctacttcacgctgtacctgccctacgtcctgtgtgtggcatggcaggactacgtgggcttcacactcaagatcttcgctagcctgctgtctcctgtggcttttgggtttggctgtgagtactttgccctttttgaggagcagggcattggagtgcagtgggacaacctgtttgagagtcctgtggaggaagatggcttcaatctcaccacttcggtctccatgatgctgtttgacaccttcctctatggggtgatgacctggtacattgaggctgtctttccaggccagtacggaattcccaggccctggtattttccttgcaccaagtcctactggtttggcgaggaaagtgatgagaagagccaccctggttccaaccagaagagaatatcagaaatctgcatggaggaggaacccacccacttgaagctgggcgtgtccattcagaacctggtaaaagtctaccgagatgggatgaaggtggctgtcgatggcctggcactgaatttttatgagggccagatcacctccttcctgggccacaatggagcggggaagacgaccaccatgtcaatcctgaccgggttgttccccccgacctcgggcaccgcctacatcctgggaaaagacattcgctctgagatgagcaccatccggcagaacctgggggtctgtccccagcataacgtgctgtttgacatgctgactgtcgaagaacacatctggttctatgcccgcttgaaagggctctctgagaagcacgtgaaggcggagatggagcagatggccctggatgttggtttgccatcaagcaagctgaaaagcaaaacaagccagctgtcaggtggaatgcagagaaagctatctgtggccttggcctttgtcgggggatctaaggttgtcattctggatgaacccacagctggtgtggacccttactcccgcaggggaatatgggagctgctgctgaaataccgacaaggccgcaccattattctctctacacaccacatggatgaagcggacgtcctgggggacaggattgccatcatctcccatgggaagctgtgctgtgtgggctcctccctgtttctgaagaaccagttgggaacaggctactacctgaccttggtcaagaaagatgtggaatcctccctcagttcctgcagaaacagtagtagcactgtgtcatacctgaaaaaggaggacagtgtttctcagagcagttctgatgctggcctgggcagcgaccatgagagtgacacgctgaccatcgatgtctctgctatctccaacctcatcaggaagcatgtgtctgaagcccggctggtggaagacatagggcatgagctgacctatgtgctgccatatgaagctgctaaggagggagcctttgtggaactctttcatgagattgatgaccggctctcagacctgggcatttctagttatggcatctcagagacgaccctggaagaaatattcctcaaggtggccgaagagagtggggtggatgctgagacctcagatggtaccttgccagcaagacgaaacaggcgggccttcggggacaagcagagctgtcttcgcccgttcactgaagatgatgctgctgatccaaatgattctgacatagacccagaatccagagagacagacttgctcagtgggatggatggcaaagggtcctaccaggtgaaaggctggaaacttacacagcaacagtttgtggcccttttgtggaagagactgctaattgccagacggagtcggaaaggattttttgctcagattgtcttgccagctgtgtttgtctgcattgcccttgtgttcagcctgatcgtgccaccctttggcaagtaccccagcctggaacttcagccctggatgtacaacgaacagtacacatttgtcagcaatgatgctcctgaggacacgggaaccctggaactcttaaacgccctcaccaaagaccctggcttcgggacccgctgtatggaaggaaacccaatcccagacacgccctgccaggcaggggaggaagagtggaccactgccccagttccccagaccatcatggacctcttccagaatgggaactggacaatgcagaacccttcacctgcatgccagtgtagcagcgacaaaatcaagaagatgctgcctgtgtgtcccccaggggcaggggggctgcctcctccacaaagaaaacaaaacactgcagatatccttcaggacctgacaggaagaaacatttcggattatctggtgaagacgtatgtgcagatcatagccaaaagcttaaagaacaagatctgggtgaatgagtttaggtatggcggcttttccctgggtgtcagtaatactcaagcacttcctccgagtcaagaagttaatgatgccaccaaacaaatgaagaaacacctaaagctggccaaggacagttctgcagatcgatttctcaacagcttgggaagatttatgacaggactggacaccagaaataatgtcaaggtgtggttcaataacaagggctggcatgcaatcagctctttcctgaatgtcatcaacaatgccattctccgggccaacctgcaaaagggagagaaccctagccattatggaattactgctttcaatcatcccctgaatctcaccaagcagcagctctcagaggtggctccgatgaccacatcagtggatgtccttgtgtccatctgtgtcatctttgcaatgtccttcgtcccagccagctttgtcgtattcctgatccaggagcgggtcagcaaagcaaaacacctgcagttcatcagtggagtgaagcctgtcatctactggctctctaattttgtctgggatatgtgcaattacgttgtccctgccacactggtcattatcatcttcatctgcttccagcagaagtcctatgtgtcctccaccaatctgcctgtgctagcccttctacttttgctgtatgggtggtcaatcacacctctcatgtacccagcctcctttgtgttcaagatccccagcacagcctatgtggtgctcaccagcgtgaacctcttcattggcattaatggcagcgtggccacctttgtgctggagctgttcaccgacaataagctgaataatatcaatgatatcctgaagtccgtgttcttgatcttcccacatttttgcctgggacgagggctcatcgacatggtgaaaaaccaggcaatggctgatgccctggaaaggtttggggagaatcgctttgtgtcaccattatcttgggacttggtgggacgaaacctcttcgccatggccgtggaaggggtggtgttcttcctcattactgttctgatccagtacagattcttcatcaggcccagacctgtaaatgcaaagctatctcctctgaatgatgaagatgaagatgtgaggcgggaaagacagagaattcttgatggtggaggccagaatgacatcttagaaatcaaggagttgacgaagatatatagaaggaagcggaagcctgctgttgacaggatttgcgtgggcattcctcctggtgagtgctttgggctcctgggagttaatggggctggaaaatcatcaactttcaagatgttaacaggagataccactgttaccagaggagatgctttccttaacagaaatagtatcttatcaaacatccatgaagtacatcagaacatgggctactgccctcagtttgatgccatcacagagctgttgactgggagagaacacgtggagttctttgcccttttgagaggagtcccagagaaagaagttggcaaggttggtgagtgggcgattcggaaactgggcctcgtgaagtatggagaaaaatatgctggtaactatagtggaggcaacaaacgcaagctctctacagccatggctttgatcggcgggcctcctgtggtgtttctggatgaacccaccacaggcatggatcccaaagcccggcggttcttgtggaattgtgccctaagtgttgtcaaggaggggagatcagtagtgcttacatctcatagtatggaagaatgtgaagctctttgcactaggatggcaatcatggtcaatggaaggttcaggtgccttggcagtgtccagcatctaaaaaataggtttggagatggttatacaatagttgtacgaatagcagggtccaacccggacctgaagcctgtccaggatttctttggacttgcatttcctggaagtgttccaaaagagaaacaccggaacatgctacaataccagcttccatcttcattatcttctctggccaggatattcagcatcctctcccagagcaaaaagcgactccacatagaagactactctgtttctcagacaacacttgaccaagtatttgtgaactttgccaaggaccaaagtgatgatgaccacttaaaagacctctcattacacaaaaaccagacagtagtggacgttgcagttctcacatcttttctacaggatgagaaagtgaaagaaagctatgtatgaagaatcctgttcatacggggtggctgaaagtaaagaggnactagactttcctttgcaccatgtgaagtgttgtggagaaaagagccagaagttgatgtgggaagaagtaaactggatactgtactgatactattcaatgcaatgcaattcaatgcaatgaaaacaaaattccattacaggggcagtgcctttgtagcctatgtcttgtatggctctcaagtgaaagacttgaatttagttttttacctatacctatgtgaaactctattatggaacccaatggacatatgggtttgaactcacactttttttttttttttgttcctgtgtattctcattggggttgcaacaataattcatcaagtaatcatggccagcgattattgatcaaaatcaaaaggtaatgcacatcctcattcactaagccatgccatgcccaggagactggtttcccggtgacacatccattgctggcaatgagtgtgccagagttattagtgccaagtttttcagaaagtttgaagcaccatggtgtgtcatgctcacttttgtgaaagctgctctgctcagagtctatcaacattgaatatcagttgacagaatggtgccatgcgtggctaacatcctgctttgattccctctgataagctgttctggtggcagtaacatgcaacaaaaatgtgggtgtctctaggcacgggaaacttggttccattgttatattgtcctatgcttcgagccatgggtctacagggtcatccttatgagactcttaaatatacttagatcctggtaagaggcaaagaatcaacagccaaactgctggggctgcaagctgctgaagccagggcatgggattaaagagattgtgcgttcaaacctagggaagcctgtgcccatttgtcctgactgtctgctaacatggtacactgcatctcaagatgtttatctgacacaagtgtattatttctggctttttgaattaatctagaaaatgaaaagatggagttgtattttgacaaaaatgtttgtactttttaatgttatttggaattttaagttctatcagtgacttctgaatccttagaatggcctctttgtagaaccctgtggtatagaggagtatggccactgccccactatttttattttcttatgtaagtttgcatatcagtcatgactagtgcctagaaagcaatgtgatggtcaggatctcatgacattatatttgagtttctttcagatcatttaggatactcttaatctcacttcatcaatcaaatattttttgagtgtatgctgtagctgaaagagtatgtacgtacgtataagactagagagatattaagtctcagtacacttcctgtgccatgttattcagctcactggtttacaaatataggttgtcttgtggttgtaggagcccactgtaacaatactgggcagcctttttttttttttttaattgcaacaatgcaaaagccaagaaagtataagggtcacaagtctaaacaatgaattcttcaacagggaaaacagctagcttgaaaacttgctgaaaaacacaacttgtgtttatggcatttagtaccttcaaataattggctttgcagatattggataccccattaaatctgacagtctcaaatttttcatctcttcaatcactagtcaagaaaaatataaaaacaacaaatacttccatatggagcatttttcagagttttctaacccagtcttatttttctagtcagtaaacatttgtaaaaatactgtttcactaatacttactgttaactgtcttgagagaaaagaaaaatatgagagaactattgtttggggaagttcaagtgatctttcaatatcattactaacttcttccactttttccaaaatttgaatattaacgctaaaggtgtaagacttcagatttcaaattaatctttctatattttttaaatttacagaatattatataacccactgctgaaaaagaaaaaaatgattgttttagaagttaaagtcaatattgattttaaatataagtaatgaaggcatatttccaataactagtgatatggcatcgttgcattttacagtatcttcaaaaatacagaatttatagaataatttctcctcatttaatatttttcaaaatcaaagttatggtttcctcattttactaaaatcgtattctaattcttcattatagtaaatctatgagcaactccttacttcggttcctctgatttcaaggccatattttaaaaaatcaaaaggcactgtgaactattttgaagaaaacacaacattttaatacagattgaaaggacctcttctgaagctagaaacaatctatagttatacatcttcattaatactgtgttaccttttaaaatagtaattttttacattttcctgtgtaaacctaattgtggtagaaatttttaccaactctatactcaatcaagcaaaatttctgtatattccctgtggaatgtacctatgtgagtttcagaaattctcaaaatacgtgttcaaaaatttctgcttttgcatctttgggacacctcagaaaacttattaacaactgtgaatatgagaaatacagaagaaaataataagccctctatacataaatgcccagcacaattcattgttaaaaaacaaccaaacctcacactactgtatttcattatctgtactgaaagcaaatgctttgtgactattaaatgttgcacatcattcattcaaaaaaaaaaaaaaaaaaa

SEQ ID NO: 109 - DNA, 9870 bp, Homo sapiens
  modified_base (7138): a, t, c or g
gtaattgcgagcgagagtgagtggggccgggacccgcagagccgagccgacccttctctcccgggctgcggcagggcagggcggggagctccgcgcaccaacagagccggttctcagggcgctttgctccttgttttttccccggttctgttttctccccttctccggaaggcttgtcaaggggtaggagaaagagacgcaaacacaaaagtggaaaacagttaatgaccagccacggcgtccctgctgtgagctctggccgctgccttccagggctcccgagccacacgctgggggtgctggctgagggaacatggcttgttggcctcagctgaggttgctgctgtggaagaacctcactttcagaagaagacaaacatgtcagctgctgctggaagtggcctggcctctatttatcttcctgatcctgatctctgttcggctgagctacccaccctatgaacaacatgaatgccattttccaaataaagccatgccctctgcaggaacacttccttgggttcaggggattatctgtaatgccaacaacccctgtttccgttacccgactcctggggaggctcccggagttgttggaaactttaacaaatccattgtggctcgcctgttctcagatgctcggaggcttcttttatacagccagaaagacaccagcatgaaggacatgcgcaaagttctgagaacattacagcagatcaagaaatccagctcaaacttgaagcttcaagatttcctggtggacaatgaaaccttctctgggttcctgtatcacaacctctctctcccaaagtctactgtggacaagatgctgagggctgatgtcattctccacaaggtatttttgcaaggctaccagttacatttgacaagtctgtgcaatggatcaaaatcagaagagatgattcaacttggtgaccaagaagtttctgagctttgtggcctaccaagggagaaactggctgcagcagagcgagtacttcgttccaacatggacatcctgaagccaatcctgagaacactaaactctacatctcccttcccgagcaaggagctggccgaagccacaaaaacattgctgcatagtcttgggactctggcccaggagctgttcagcatgagaagctggagtgacatgcgacaggaggtgatgtttctgaccaatgtgaacagctccagctcctccacccaaatctaccaggctgtgtctcgtattgtctgcgggcatcccgagggaggggggctgaagatcaagtctctcaactggtatgaggacaacaactacaaagccctctttggaggcaatggcactgaggaagatgctgaaaccttctatgacaactctacaactccttactgcaatgatttgatgaagaatttggagtctagtcctctttcccgcattatctggaaagctctgaagccgctgctcgttgggaagatcctgtatacacctgacactccagccacaaggcaggtcatggctgaggtgaacaagaccttccaggaactggctgtgttccatgatctggaaggcatgtgggaggaactcagccccaagatctggaccttcatggagaacagccaagaaatggaccttgtccggatgctgttggacagcagggacaatgaccacttttgggaacagcagttggatggcttagattggacagcccaagacatcgtggcgtttttggccaagcacccagaggatgtccagtccagtaatggttctgtgtacacctggagagaagctttcaacgagactaaccaggcaatccggaccatatctcgcttcatggagtgtgtcaacctgaacaagctagaacccatagcaacagaagtctggctcatcaacaagtccatggagctgctggatgagaggaagttctgggctggtattgtgttcactggaattactccaggcagcattgagctgccccatcatgtcaagtacaagatccgaatggacattgacaatgtggagaggacaaataaaatcaaggatgggtactgggaccctggtcctcgagctgacccctttgaggacatgcggtacgtctgggggggcttcgcctacttgcaggatgtggtggagcaggcaatcatcagggtgctgacgggcaccgagaagaaaactggtgtctatatgcaacagatgccctatccctgttacgttgatgacatctttctgcgggtgatgagccggtcaatgcccctcttcatgacgctggcctggatttactcagtggctgtgatcatcaagggcatcgtgtatgagaaggaggcacggctgaaagagaccatgcggatcatgggcctggacaacagcatcctctggtttagctggttcattagtagcctcattcctcttcttgtgagcgctggcctgctagtggtcatcctgaagttaggaaacctgctgccctacagtgatcccagcgtggtgtttgtcttcctgtccgtgtttgctgtggtgacaatcctgcagtgcttcctgattagcacactcttctccagagccaacctggcagcagcctgtgggggcatcatctacttcacgctgtacctgccctacgtcctgtgtgtggcatggcaggactacgtgggcttcacactcaagatcttcgctagcctgctgtctcctgtggcttttgggtttggctgtgagtactttgccctttttgaggagcagggcattggagtgcagtgggacaacctgtttgagagtcctgtggaggaagatggcttcaatctcaccacttcggtctccatgatgctgtttgacaccttcctctatggggtgatgacctggtacattgaggctgtctttccaggccagtacggaattcccaggccctggtattttccttgcaccaagtcctactggtttggcgaggaaagtgatgagaagagccaccctggttccaaccagaagagaatatcagaaatctgcatggaggaggaacccacccacttgaagctgggcgtgtccattcagaacctggtaaaagtctaccgagatgggatgaaggtggctgtcgatggcctggcactgaatttttatgagggccagatcacctccttcctgggccacaatggagcggggaagacgaccaccatgtcaatcctgaccgggttgttccccccgacctcgggcaccgcctacatcctgggaaaagacattcgctctgagatgagcaccatccggcagaacctgggggtctgtccccagcataacgtgctgtttgacatgctgactgtcgaagaacacatctggttctatgcccgcttgaaagggctctctgagaagcacgtgaaggcggagatggagcagatggccctggatgttggtttgccatcaagcaagctgaaaagcaaaacaagccagctgtcaggtggaatgcagagaaagctatctgtggccttggcctttgtcgggggatctaaggttgtcattctggatgaacccacagctggtgtggacccttactcccgcaggggaatatgggagctgctgctgaaataccgacaaggccgcaccattattctctctacacaccacatggatgaagcggacgtcctgggggacaggattgccatcatctcccatgggaagctgtgctgtgtgggctcctccctgtttctgaagaaccagctgggaacaggctactacctgaccttggtcaagaaagatgtggaatcctccctcagttcctgcagaaacagtagtagcactgtgtcatacctgaaaaaggaggacagtgtttctcagagcagttctgatgctggcctgggcagcgaccatgacagtgacacgctgaccatcgatgtctctgctatctccaacctcatcaggaagcatgtgtctgaagcccggctggtggaagacatagggcatgagctgacctatgtgctgccatatgaagctgctaaggagggagcctttgtggaactctttcatgagattgatgaccggctctcagacctgggcatttctagttatggcatctcagagacgaccctggaagaaatattcctcaaggtggccgaagagagtggggtggatgctgagacctcagatggtaccttgccagcaagacgaaacaggcgggccttcggggacaagcagagctgtcttcgcccgttcactgaagatgatgctgctgatccaaatgattctgacatagacccagaatccagagagacagacttgctcagtgggatggatggcaaagggtcctaccaggtgaaaggctggaaacttacacagcaacagtttgtggcccttttgtggaagagactgctaattgccagacggagtcggaaaggattttttgctcagattgtcttgccagctgtgtttgtctgcattgcccttgtgttcagcctgatcgtgccaccctttggcaagtaccccagcctggaacttcagccctggatgtacaacgaacagtacacatttgtcagcaatgatgctcctgaggacacgggaaccctggaactcttaaacgccctcaccaaagaccctggcttcgggacccgctgtatggaaggaaacccaatcccagacacgccctgccaggcaggggaggaagagtggaccactgccccagttccccagaccatcatggacctcttccagaatgggaactggacaatgcagaacccttcacctgcatgccagtgtagcagcgacaaaatcaagaagatgctgcctgtgtgtcccccaggggcaggggggctgcctcctccacaaagaaaacaaaacactgcagatatccttcaggacctgacaggaagaaacatttcggattatctggtgaagacgtatgtgcagatcatagccaaaagcttaaagaacaagatctgggtgaatgagtttaggtatggcggcttttccctgggtgtcagtaatactcaagcacttcctccgagtcaagaagttaatgatgccaccaaacaaatgaagaaacacctaaagctggccaaggacagttctgcagatcgatttctcaacagcttgggaagatttatgacaggactggacaccagaaataatgtcaaggtgtggttcaataacaagggctggcatgcaatcagctctttcctgaatgtcatcaacaatgccattctccgggccaacctgcaaaagggagagaaccctagccattatggaattactgctttcaatcatcccctgaatctcaccaagcagcagctctcagaggtggctccgatgaccacatcagtggatgtccttgtgtccatctgtgtcatctttgcaatgtccttcgtcccagccagctttgtcgtattcctgatccaggagcgggtcagcaaagcaaaacacctgcagttcatcagtggagtgaagcctgtcatctactggctctctaattttgtctgggatatgtgcaattacgttgtccctgccacactggtcattatcatcttcatctgcttccagcagaagtcctatgtgtcctccaccaatctgcctgtgctagcccttctacttttgctgtatgggtggtcaatcacacctctcatgtacccagcctcctttgtgttcaagatccccagcacagcctatgtggtgctcaccagcgtgaacctcttcattggcattaatggcagcgtggccacctttgtgctggagctgttcaccgacaataagctgaataatatcaatgatatcctgaagtccgtgttcttgatcttcccacatttttgcctgggacgagggctcatcgacatggtgaaaaaccaggcaatggctgatgccctggaaaggtttggggagaatcgctttgtgtcaccattatcttgggacttggtgggacgaaacctcttcgccatggccgtggaaggggtggtgttcttcctcattactgttctgatccagtacagattcttcatcaggcccagacctgtaaatgcaaagctatctcctctgaatgatgaagatgaagatgtgaggcgggaaagacagagaattcttgatggtggaggccagaatgacatcttagaaatcaaggagttgacgaagatatatagaaggaagcggaagcctgctgttgacaggatttgcgtgggcattcctcctggtgagtgctttgggctcctgggagttaatggggctggaaaatcatcaactttcaagatgttaacaggagataccactgttaccagaggagatgctttccttaacagaaatagtatcttatcaaacatccatgaagtacatcagaacatgggctactgccctcagtttgatgccatcacagagctgttgactgggagagaacacgtggagttctttgcccttttgagaggagtcccagagaaagaagttggcaaggttggtgagtgggcgattcggaaactgggcctcgtgaagtatggagaaaaatatgctggtaactatagtggaggcaacaaacgcaagctctctacagccatggctttgatcggcgggcctcctgtggtgtttctggatgaacccaccacaggcatggatcccaaagcccggcggttcttgtggaattgtgccctaagtgttgtcaaggaggggagatcagtagtgcttacatctcatagtatggaagaatgtgaagctctttgcactaggatggcaatcatggtcaatggaaggttcaggtgccttggcagtgtccagcatctaaaaaataggtttggagatggttatacaatagttgtacgaatagcagggtccaacccggacctgaagcctgtccaggatttctttggacttgcatttcctggaagtgttccaaaagagaaacaccggaacatgctacaataccagcttccatcttcattatcttctctggccaggatattcagcatcctctcccagagcaaaaagcgactccacatagaagactactctgtttctcagacaacacttgaccaagtatttgtgaactttgccaaggaccaaagtgatgatgaccacttaaaagacctctcattacacaaaaaccagacagtagtggacgttgcagttctcacatcttttctacaggatgagaaagtgaaagaaagctatgtatgaagaatcctgttcatacggggtggctgaaagtaaagaggnactagactttcctttgcaccatgtgaagtgttgtggagaaaagagccagaagttgatgtgggaagaagtaaactggatactgtactgatactattcaatgcaatgcaattcaatgcaatgaaaacaaaattccattacaggggcagtgcctttgtagcctatgtcttgtatggctctcaagtgaaagacttgaatttagttttttacctatacctatgtgaaactctattatggaacccaatggacatatgggtttgaactcacactttttttttttttttgttcctgtgtattctcattggggttgcaacaataattcatcaagtaatcatggccagcgattattgatcaaaatcaaaaggtaatgcacatcctcattcactaagccatgccatgcccaggagactggtttcccggtgacacatccattgctggcaatgagtgtgccagagttattagtgccaagtttttcagaaagtttgaagcaccatggtgtgtcatgctcacttttgtgaaagctgctctgctcagagtctatcaacattgaatatcagttgacagaatggtgccatgcgtggctaacatcctgctttgattccctctgataagctgttctggtggcagtaacatgcaacaaaaatgtgggtgtctctaggcacgggaaacttggttccattgttatattgtcctatgcttcgagccatgggtctacagggtcatccttatgagactcttaaatatacttagatcctggtaagaggcaaagaatcaacagccaaactgctggggctgcaagctgctgaagccagggcatgggattaaagagattgtgcgttcaaacctagggaagcctgtgcccatttgtcctgactgtctgctaacatggtacactgcatctcaagatgtttatctgacacaagtgtattatttctggctttttgaattaatctagaaaatgaaaagatggagttgtattttgacaaaaatgtttgtactttttaatgttatttggaattttaagttctatcagtgacttctgaatccttagaatggcctctttgtagaaccctgtggtatagaggagtatggccactgccccactatttttattttcttatgtaagtttgcatatcagtcatgactagtgcctagaaagcaatgtgatggtcaggatctcatgacattatatttgagtttctttcagatcatttaggatactcttaatctcacttcatcaatcaaatattttttgagtgtatgctgtagctgaaagagtatgtacgtacgtataagactagagagatattaagtctcagtacacttcctgtgccatgttattcagctcactggtttacaaatataggttgtcttgtggttgtaggagcccactgtaacaatactgggcagcctttttttttttttttaattgcaacaatgcaaaagccaagaaagtataagggtcacaagtctaaacaatgaattcttcaacagggaaaacagctagcttgaaaacttgctgaaaaacacaacttgtgtttatggcatttagtaccttcaaataattggctttgcagatattggataccccattaaatctgacagtctcaaatttttcatctcttcaatcactagtcaagaaaaatataaaaacaacaaatacttccatatggagcatttttcagagttttctaacccagtcttatttttctagtcagtaaacatttgtaaaaatactgtttcactaatacttactgttaactgtcttgagagaaaagaaaaatatgagagaactattgtttggggaagttcaagtgatctttcaatatcattactaacttcttccactttttccaaaatttgaatattaacgctaaaggtgtaagacttcagatttcaaattaatctttctatattttttaaatttacagaatattatataacccactgctgaaaaagaaaaaaatgattgttttagaagttaaagtcaatattgattttaaatataagtaatgaaggcatatttccaataactagtgatatggcatcgttgcattttacagtatcttcaaaaatacagaatttatagaataatttctcctcatttaatatttttcaaaatcaaagttatggtttcctcattttactaaaatcgtattctaattcttcattatagtaaatctatgagcaactccttacttcggttcctctgatttcaaggccatattttaaaaaatcaaaaggcactgtgaactattttgaagaaaacacaacattttaatacagattgaaaggacctcttctgaagctagaaacaatctatagttatacatcttcattaatactgtgttaccttttaaaatagtaattttttacattttcctgtgtaaacctaattgtggtagaaatttttaccaactctatactcaatcaagcaaaatttctgtatattccctgtggaatgtacctatgtgagtttcagaaattctcaaaatacgtgttcaaaaatttctgcttttgcatctttgggacacctcagaaaacttattaacaactgtgaatatgagaaatacagaagaaaataataagccctctatacataaatgcccagcacaattcattgttaaaaaacaaccaaacctcacactactgtatttcattatctgtactgaaagcaaatgctttgtgactattaaatgttgcacatcattcattcaaaaaaaaaaaaaaaaaaa

SEQ ID NO: 110 - DNA, 9870 bp, Homo sapiens
  modified_base (7138): a, t, c or g
gtaattgcgagcgagagtgagtggggccgggacccgcagagccgagccgacccttctctcccgggctgcggcagggcagggcggggagctccgcgcaccaacagagccggttctcagggcgctttgctccttgttttttccccggttctgttttctccccttctccggaaggcttgtcaaggggtaggagaaagagacgcaaacacaaaagtggaaaacagttaatgaccagccacggcgtccctgctgtgagctctggccgctgccttccagggctcccgagccacacgctgggggtgctggctgagggaacatggcttgttggcctcagctgaggttgctgctgtggaagaacctcactttcagaagaagacaaacatgtcagctgctgctggaagtggcctggcctctatttatcttcctgatcctgatctctgttcggctgagctacccaccctatgaacaacatgaatgccattttccaaataaagccatgccctctgcaggaacacttccttgggttcaggggattatctgtaatgccaacaacccctgtttccgttacccgactcctggggaggctcccggagttgttggaaactttaacaaatccattgtggctcgcctgttctcagatgctcggaggcttcttttatacagccagaaagacaccagcatgaaggacatgcgcaaagttctgagaacattacagcagatcaagaaatccagctcaaacttgaagcttcaagatttcctggtggacaatgaaaccttctctgggttcctgtatcacaacctctctctcccaaagtctactgtggacaagatgctgagggctgatgtcattctccacaaggtatttttgcaaggctaccagttacatttgacaagtctgtgcaatggatcaaaatcagaagagatgattcaacttggtgaccaagaagtttctgagctttgtggcctaccaagggagaaactggctgcagcagagcgagtacttcgttccaacatggacatcctgaagccaatcctgagaacactaaactctacatctcccttcccgagcaaggagctggccgaagccacaaaaacattgctgcatagtcttgggactctggcccaggagctgttcagcatgagaagctggagtgacatgcgacaggaggtgatgtttctgaccaatgtgaacagctccagctcctccacccaaatctaccaggctgtgtctcgtattgtctgcgggcatcccgagggaggggggctgaagatcaagtctctcaactggtatgaggacaacaactacaaagccctctttggaggcaatggcactgaggaagatgctgaaaccttctatgacaactctacaactccttactgcaatgatttgatgaagaatttggagtctagtcctctttcccgcattatctggaaagctctgaagccgctgctcgttgggaagatcctgtatacacctgacactccagccacaaggcaggtcatggctgaggtgaacaagaccttccaggaactggctgtgttccatgatctggaaggcatgtgggaggaactcagccccaagatctggaccttcatggagaacagccaagaaatggaccttgtccggatgctgttggacagcagggacaatgaccacttttgggaacagcagttggatggcttagattggacagcccaagacatcgtggcgtttttggccaagcacccagaggatgtccagtccagtaatggttctgtgtacacctggagagaagctttcaacgagactaaccaggcaatccggaccatatctcgcttcatggagtgtgtcaacctgaacaagctagaacccatagcaacagaagtctggctcatcaacaagtccatggagctgctggatgagaggaagttctgggctggtattgtgttcactggaattactccaggcagcattgagctgccccatcatgtcaagtacaagatccgaatggacattgacaatgtggagaggacaaataaaatcaaggatgggtactgggaccctggtcctcgagctgacccctttgaggacatgcggtacgtctgggggggcttcgcctacttgcaggatgtggtggagcaggcaatcatcagggtgctgacgggcaccgagaagaaaactggtgtctatatgcaacagatgccctatccctgttacgttgatgacatctttctgcgggtgatgagccggtcaatgcccctcttcatgacgctggcctggatttactcagtggctgtgatcatcaagggcatcgtgtatgagaaggaggcacggctgaaagagaccatgcggatcatgggcctggacaacagcatcctctggtttagctggttcattagtagcctcattcctcttcttgtgagcgctggcctgctagtggtcatcctgaagttaggaaacctgctgccctacagtgatcccagcgtggtgtttgtcttcctgtccgtgtttgctgtggtgacaatcctgcagtgcttcctgattagcacactcttctccagagccaacctggcagcagcctgtgggggcatcatctacttcacgctgtacctgccctacgtcctgtgtgtggcatggcaggactacgtgggcttcacactcaagatcttcgctagcctgctgtctcctgtggcttttgggtttggctgtgagtactttgccctttttgaggagcagggcattggagtgcagtgggacaacctgtttgagagtcctgtggaggaagatggcttcaatctcaccacttcggtctccatgatgctgtttgacaccttcctctatggggtgatgacctggtacattgaggctgtctttccaggccagtacggaattcccaggccctggtattttccttgcaccaagtcctactggtttggcgaggaaagtgatgagaagagccaccctggttccaaccagaagagaatatcagaaatctgcatggaggaggaacccacccacttgaagctgggcgtgtccattcagaacctggtaaaagtctaccgagatgggatgaaggtggctgtcgatggcctggcactgaatttttatgagggccagatcacctccttcctgggccacaatggagcggggaagacgaccaccatgtcaatcctgaccgggttgttccccccgacctcgggcaccgcctacatcctgggaaaagacattcgctctgagatgagcaccatccggcagaacctgggggtctgtccccagcataacgtgctgtttgacatgctgactgtcgaagaacacatctggttctatgcccgcttgaaagggctctctgagaagcacgtgaaggcggagatggagcagatggccctggatgttggtttgccatcaagcaagctgaaaagcaaaacaagccagctgtcaggtggaatgcagagaaagctatctgtggccttggcctttgtcgggggatctaaggttgtcattctggatgaacccacagctggtgtggacccttactcccgcaggggaatatgggagctgctgctgaaataccgacaaggccgcaccattattctctctacacaccacatggatgaagcggacgtcctgggggacaggattgccatcatctcccatgggaagctgtgctgtgtgggctcctccctgtttctgaagaaccagctgggaacaggctactacctgaccttggtcaagaaagatgtggaatcctccctcagttcctgcagaaacagtagtagcactgtgtcatacctgaaaaaggaggacagtgtttctcagagcagttctgatgctggcctgggcagcgaccatgagagtgacacgctgaccatcgatgtctctgctatctccaacctcatcaggaagcatgtgtctgaagcccggctggtggaagacatagggcatgagctgacctatgtgctgccatatgaggctgctaaggagggagcctttgtggaactctttcatgagattgatgaccggctctcagacctgggcatttctagttatggcatctcagagacgaccctggaagaaatattcctcaaggtggccgaagagagtggggtggatgctgagacctcagatggtaccttgccagcaagacgaaacaggcgggccttcggggacaagcagagctgtcttcgcccgttcactgaagatgatgctgctgatccaaatgattctgacatagacccagaatccagagagacagacttgctcagtgggatggatggcaaagggtcctaccaggtgaaaggctggaaacttacacagcaacagtttgtggcccttttgtggaagagactgctaattgccagacggagtcggaaaggattttttgctcagattgtcttgccagctgtgtttgtctgcattgcccttgtgttcagcctgatcgtgccaccctttggcaagtaccccagcctggaacttcagccctggatgtacaacgaacagtacacatttgtcagcaatgatgctcctgaggacacgggaaccctggaactcttaaacgccctcaccaaagaccctggcttcgggacccgctgtatggaaggaaacccaatcccagacacgccctgccaggcaggggaggaagagtggaccactgccccagttccccagaccatcatggacctcttccagaatgggaactggacaatgcagaacccttcacctgcatgccagtgtagcagcgacaaaatcaagaagatgctgcctgtgtgtcccccaggggcaggggggctgcctcctccacaaagaaaacaaaacactgcagatatccttcaggacctgacaggaagaaacatttcggattatctggtgaagacgtatgtgcagatcatagccaaaagcttaaagaacaagatctgggtgaatgagtttaggtatggcggcttttccctgggtgtcagtaatactcaagcacttcctccgagtcaagaagttaatgatgccaccaaacaaatgaagaaacacctaaagctggccaaggacagttctgcagatcgatttctcaacagcttgggaagatttatgacaggactggacaccagaaataatgtcaaggtgtggttcaataacaagggctggcatgcaatcagctctttcctgaatgtcatcaacaatgccattctccgggccaacctgcaaaagggagagaaccctagccattatggaattactgctttcaatcatcccctgaatctcaccaagcagcagctctcagaggtggctccgatgaccacatcagtggatgtccttgtgtccatctgtgtcatctttgcaatgtccttcgtcccagccagctttgtcgtattcctgatccaggagcgggtcagcaaagcaaaacacctgcagttcatcagtggagtgaagcctgtcatctactggctctctaattttgtctgggatatgtgcaattacgttgtccctgccacactggtcattatcatcttcatctgcttccagcagaagtcctatgtgtcctccaccaatctgcctgtgctagcccttctacttttgctgtatgggtggtcaatcacacctctcatgtacccagcctcctttgtgttcaagatccccagcacagcctatgtggtgctcaccagcgtgaacctcttcattggcattaatggcagcgtggccacctttgtgctggagctgttcaccgacaataagctgaataatatcaatgatatcctgaagtccgtgttcttgatcttcccacatttttgcctgggacgagggctcatcgacatggtgaaaaaccaggcaatggctgatgccctggaaaggtttggggagaatcgctttgtgtcaccattatcttgggacttggtgggacgaaacctcttcgccatggccgtggaaggggtggtgttcttcctcattactgttctgatccagtacagattcttcatcaggcccagacctgtaaatgcaaagctatctcctctgaatgatgaagatgaagatgtgaggcgggaaagacagagaattcttgatggtggaggccagaatgacatcttagaaatcaaggagttgacgaagatatatagaaggaagcggaagcctgctgttgacaggatttgcgtgggcattcctcctggtgagtgctttgggctcctgggagttaatggggctggaaaatcatcaactttcaagatgttaacaggagataccactgttaccagaggagatgctttccttaacagaaatagtatcttatcaaacatccatgaagtacatcagaacatgggctactgccctcagtttgatgccatcacagagctgttgactgggagagaacacgtggagttctttgcccttttgagaggagtcccagagaaagaagttggcaaggttggtgagtgggcgattcggaaactgggcctcgtgaagtatggagaaaaatatgctggtaactatagtggaggcaacaaacgcaagctctctacagccatggctttgatcggcgggcctcctgtggtgtttctggatgaacccaccacaggcatggatcccaaagcccggcggttcttgtggaattgtgccctaagtgttgtcaaggaggggagatcagtagtgcttacatctcatagtatggaagaatgtgaagctctttgcactaggatggcaatcatggtcaatggaaggttcaggtgccttggcagtgtccagcatctaaaaaataggtttggagatggttatacaatagttgtacgaatagcagggtccaacccggacctgaagcctgtccaggatttctttggacttgcatttcctggaagtgttccaaaagagaaacaccggaacatgctacaataccagcttccatcttcattatcttctctggccaggatattcagcatcctctcccagagcaaaaagcgactccacatagaagactactctgtttctcagacaacacttgaccaagtatttgtgaactttgccaaggaccaaagtgatgatgaccacttaaaagacctctcattacacaaaaaccagacagtagtggacgttgcagttctcacatcttttctacaggatgagaaagtgaaagaaagctatgtatgaagaatcctgttcatacggggtggctgaaagtaaagaggnactagactttcctttgcaccatgtgaagtgttgtggagaaaagagccagaagttgatgtgggaagaagtaaactggatactgtactgatactattcaatgcaatgcaattcaatgcaatgaaaacaaaattccattacaggggcagtgcctttgtagcctatgtcttgtatggctctcaagtgaaagacttgaatttagttttttacctatacctatgtgaaactctattatggaacccaatggacatatgggtttgaactcacactttttttttttttttgttcctgtgtattctcattggggttgcaacaataattcatcaagtaatcatggccagcgattattgatcaaaatcaaaaggtaatgcacatcctcattcactaagccatgccatgcccaggagactggtttcccggtgacacatccattgctggcaatgagtgtgccagagttattagtgccaagtttttcagaaagtttgaagcaccatggtgtgtcatgctcacttttgtgaaagctgctctgctcagagtctatcaacattgaatatcagttgacagaatggtgccatgcgtggctaacatcctgctttgattccctctgataagctgttctggtggcagtaacatgcaacaaaaatgtgggtgtctctaggcacgggaaacttggttccattgttatattgtcctatgcttcgagccatgggtctacagggtcatccttatgagactcttaaatatacttagatcctggtaagaggcaaagaatcaacagccaaactgctggggctgcaagctgctgaagccagggcatgggattaaagagattgtgcgttcaaacctagggaagcctgtgcccatttgtcctgactgtctgctaacatggtacactgcatctcaagatgtttatctgacacaagtgtattatttctggctttttgaattaatctagaaaatgaaaagatggagttgtattttgacaaaaatgtttgtactttttaatgttatttggaattttaagttctatcagtgacttctgaatccttagaatggcctctttgtagaaccctgtggtatagaggagtatggccactgccccactatttttattttcttatgtaagtttgcatatcagtcatgactagtgcctagaaagcaatgtgatggtcaggatctcatgacattatatttgagtttctttcagatcatttaggatactcttaatctcacttcatcaatcaaatattttttgagtgtatgctgtagctgaaagagtatgtacgtacgtataagactagagagatattaagtctcagtacacttcctgtgccatgttattcagctcactggtttacaaatataggttgtcttgtggttgtaggagcccactgtaacaatactgggcagcctttttttttttttttaattgcaacaatgcaaaagccaagaaagtataagggtcacaagtctaaacaatgaattcttcaacagggaaaacagctagcttgaaaacttgctgaaaaacacaacttgtgtttatggcatttagtaccttcaaataattggctttgcagatattggataccccattaaatctgacagtctcaaatttttcatctcttcaatcactagtcaagaaaaatataaaaacaacaaatacttccatatggagcatttttcagagttttctaacccagtcttatttttctagtcagtaaacatttgtaaaaatactgtttcactaatacttactgttaactgtcttgagagaaaagaaaaatatgagagaactattgtttggggaagttcaagtgatctttcaatatcattactaacttcttccactttttccaaaatttgaatattaacgctaaaggtgtaagacttcagatttcaaattaatctttctatattttttaaatttacagaatattatataacccactgctgaaaaagaaaaaaatgattgttttagaagttaaagtcaatattgattttaaatataagtaatgaaggcatatttccaataactagtgatatggcatcgttgcattttacagtatcttcaaaaatacagaatttatagaataatttctcctcatttaatatttttcaaaatcaaagttatggtttcctcattttactaaaatcgtattctaattcttcattatagtaaatctatgagcaactccttacttcggttcctctgatttcaaggccatattttaaaaaatcaaaaggcactgtgaactattttgaagaaaacacaacattttaatacagattgaaaggacctcttctgaagctagaaacaatctatagttatacatcttcattaatactgtgttaccttttaaaatagtaattttttacattttcctgtgtaaacctaattgtggtagaaatttttaccaactctatactcaatcaagcaaaatttctgtatattccctgtggaatgtacctatgtgagtttcagaaattctcaaaatacgtgttcaaaaatttctgcttttgcatctttgggacacctcagaaaacttattaacaactgtgaatatgagaaatacagaagaaaataataagccctctatacataaatgcccagcacaattcattgttaaaaaacaaccaaacctcacactactgtatttcattatctgtactgaaagcaaatgctttgtgactattaaatgttgcacatcattcattcaaaaaaaaaaaaaaaaaaa

SEQ ID NO: 111 - DNA, 9870 bp, Homo sapiens
  modified_base (7138): a, t, c or g
gtaattgcgagcgagagtgagtggggccgggacccgcagagccgagccgacccttctctcccgggctgcggcagggcagggcggggagctccgcgcaccaacagagccggttctcagggcgctttgctccttgttttttccccggttctgttttctccccttctccggaaggcttgtcaaggggtaggagaaagagacgcaaacacaaaagtggaaaacagttaatgaccagccacggcgtccctgctgtgagctctggccgctgccttccagggctcccgagccacacgctgggggtgctggctgagggaacatggcttgttggcctcagctgaggttgctgctgtggaagaacctcactttcagaagaagacaaacatgtcagctgctgctggaagtggcctggcctctatttatcttcctgatcctgatctctgttcggctgagctacccaccctatgaacaacatgaatgccattttccaaataaagccatgccctctgcaggaacacttccttgggttcaggggattatctgtaatgccaacaacccctgtttccgttacccgactcctggggaggctcccggagttgttggaaactttaacaaatccattgtggctcgcctgttctcagatgctcggaggcttcttttatacagccagaaagacaccagcatgaaggacatgcgcaaagttctgagaacattacagcagatcaagaaatccagctcaaacttgaagcttcaagatttcctggtggacaatgaaaccttctctgggttcctgtatcacaacctctctctcccaaagtctactgtggacaagatgctgagggctgatgtcattctccacaaggtatttttgcaaggctaccagttacatttgacaagtctgtgcaatggatcaaaatcagaagagatgattcaacttggtgaccaagaagtttctgagctttgtggcctaccaagggagaaactggctgcagcagagcgagtacttcgttccaacatggacatcctgaagccaatcctgagaacactaaactctacatctcccttcccgagcaaggagctggccgaagccacaaaaacattgctgcatagtcttgggactctggcccaggagctgttcagcatgagaagctggagtgacatgcgacaggaggtgatgtttctgaccaatgtgaacagctccagctcctccacccaaatctaccaggctgtgtctcgtattgtctgcgggcatcccgagggaggggggctgaagatcaagtctctcaactggtatgaggacaacaactacaaagccctctttggaggcaatggcactgaggaagatgctgaaaccttctatgacaactctacaactccttactgcaatgatttgatgaagaatttggagtctagtcctctttcccgcattatctggaaagctctgaagccgctgctcgttgggaagatcctgtatacacctgacactccagccacaaggcaggtcatggctgaggtgaacaagaccttccaggaactggctgtgttccatgatctggaaggcatgtgggaggaactcagccccaagatctggaccttcatggagaacagccaagaaatggaccttgtccggatgctgttggacagcagggacaatgaccacttttgggaacagcagttggatggcttagattggacagcccaagacatcgtggcgtttttggccaagcacccagaggatgtccagtccagtaatggttctgtgtacacctggagagaagctttcaacgagactaaccaggcaatccggaccatatctcgcttcatggagtgtgtcaacctgaacaagctagaacccatagcaacagaagtctggctcatcaacaagtccatggagctgctggatgagaggaagttctgggctggtattgtgttcactggaattactccaggcagcattgagctgccccatcatgtcaagtacaagatccgaatggacattgacaatgtggagaggacaaataaaatcaaggatgggtactgggaccctggtcctcgagctgacccctttgaggacatgcggtacgtctgggggggcttcgcctacttgcaggatgtggtggagcaggcaatcatcagggtgctgacgggcaccgagaagaaaactggtgtctatatgcaacagatgccctatccctgttacgttgatgacatctttctgcgggtgatgagccggtcaatgcccctcttcatgacgctggcctggatttactcagtggctgtgatcatcaagggcatcgtgtatgagaaggaggcacggctgaaagagaccatgcggatcatgggcctggacaacagcatcctctggtttagctggttcattagtagcctcattcctcttcttgtgagcgctggcctgctagtggtcatcctgaagttaggaaacctgctgccctacagtgatcccagcgtggtgtttgtcttcctgtccgtgtttgctgtggtgacaatcctgcagtgcttcctgattagcacactcttctccagagccaacctggcagcagcctgtgggggcatcatctacttcacgctgtacctgccctacgtcctgtgtgtggcatggcaggactacgtgggcttcacactcaagatcttcgctagcctgctgtctcctgtggcttttgggtttggctgtgagtactttgccctttttgaggagcagggcattggagtgcagtgggacaacctgtttgagagtcctgtggaggaagatggcttcaatctcaccacttcggtctccatgatgctgtttgacaccttcctctatggggtgatgacctggtacattgaggctgtctttccaggccagtacggaattcccaggccctggtattttccttgcaccaagtcctactggtttggcgaggaaagtgatgagaagagccaccctggttccaaccagaagagaatatcagaaatctgcatggaggaggaacccacccacttgaagctgggcgtgtccattcagaacctggtaaaagtctaccgagatgggatgaaggtggctgtcgatggcctggcactgaatttttatgagggccagatcacctccttcctgggccacaatggagcggggaagacgaccaccatgtcaatcctgaccgggttgttccccccgacctcgggcaccgcctacatcctgggaaaagacattcgctctgagatgagcaccatccggcagaacctgggggtctgtccccagcataacgtgctgtttgacatgctgactgtcgaagaacacatctggttctatgcccgcttgaaagggctctctgagaagcacgtgaaggcggagatggagcagatggccctggatgttggtttgccatcaagcaagctgaaaagcaaaacaagccagctgtcaggtggaatgcagagaaagctatctgtggccttggcctttgtcgggggatctaaggttgtcattctggatgaacccacagctggtgtggacccttactcccgcaggggaatatgggagctgctgctgaaataccgacaaggccgcaccattattctctctacacaccacatggatgaagcggacgtcctgggggacaggattgccatcatctcccatgggaagctgtgctgtgtgggctcctccctgtttctgaagaaccagctgggaacaggctactacctgaccttggtcaagaaagatgtggaatcctccctcagttcctgcagaaacagtagtagcactgtgtcatacctgaaaaaggaggacagtgtttctcagagcagttctgatgctggcctgggcagcgaccatgagagtgacacgctgaccatcgatgtctctgctatctccaacctcatcaggaagcatgtgtctgaagcccggctggtggaagacatagggcatgagctgacctatgtgctgccatatgaagctgctaaggagggagcctttgtggaactctttcatgagattgatgaccgactctcagacctgggcatttctagttatggcatctcagagacgaccctggaagaaatattcctcaaggtggccgaagagagtggggtggatgctgagacctcagatggtaccttgccagcaagacgaaacaggcgggccttcggggacaagcagagctgtcttcgcccgttcactgaagatgatgctgctgatccaaatgattctgacatagacccagaatccagagagacagacttgctcagtgggatggatggcaaagggtcctaccaggtgaaaggctggaaacttacacagcaacagtttgtggcccttttgtggaagagactgctaattgccagacggagtcggaaaggattttttgctcagattgtcttgccagctgtgtttgtctgcattgcccttgtgttcagcctgatcgtgccaccctttggcaagtaccccagcctggaacttcagccctggatgtacaacgaacagtacacatttgtcagcaatgatgctcctgaggacacgggaaccctggaactcttaaacgccctcaccaaagaccctggcttcgggacccgctgtatggaaggaaacccaatcccagacacgccctgccaggcaggggaggaagagtggaccactgccccagttccccagaccatcatggacctcttccagaatgggaactggacaatgcagaacccttcacctgcatgccagtgtagcagcgacaaaatcaagaagatgctgcctgtgtgtcccccaggggcaggggggctgcctcctccacaaagaaaacaaaacactgcagatatccttcaggacctgacaggaagaaacatttcggattatctggtgaagacgtatgtgcagatcatagccaaaagcttaaagaacaagatctgggtgaatgagtttaggtatggcggcttttccctgggtgtcagtaatactcaagcacttcctccgagtcaagaagttaatgatgccaccaaacaaatgaagaaacacctaaagctggccaaggacagttctgcagatcgatttctcaacagcttgggaagatttatgacaggactggacaccagaaataatgtcaaggtgtggttcaataacaagggctggcatgcaatcagctctttcctgaatgtcatcaacaatgccattctccgggccaacctgcaaaagggagagaaccctagccattatggaattactgctttcaatcatcccctgaatctcaccaagcagcagctctcagaggtggctccgatgaccacatcagtggatgtccttgtgtccatctgtgtcatctttgcaatgtccttcgtcccagccagctttgtcgtattcctgatccaggagcgggtcagcaaagcaaaacacctgcagttcatcagtggagtgaagcctgtcatctactggctctctaattttgtctgggatatgtgcaattacgttgtccctgccacactggtcattatcatcttcatctgcttccagcagaagtcctatgtgtcctccaccaatctgcctgtgctagcccttctacttttgctgtatgggtggtcaatcacacctctcatgtacccagcctcctttgtgttcaagatccccagcacagcctatgtggtgctcaccagcgtgaacctcttcattggcattaatggcagcgtggccacctttgtgctggagctgttcaccgacaataagctgaataatatcaatgatatcctgaagtccgtgttcttgatcttcccacatttttgcctgggacgagggctcatcgacatggtgaaaaaccaggcaatggctgatgccctggaaaggtttggggagaatcgctttgtgtcaccattatcttgggacttggtgggacgaaacctcttcgccatggccgtggaaggggtggtgttcttcctcattactgttctgatccagtacagattcttcatcaggcccagacctgtaaatgcaaagctatctcctctgaatgatgaagatgaagatgtgaggcgggaaagacagagaattcttgatggtggaggccagaatgacatcttagaaatcaaggagttgacgaagatatatagaaggaagcggaagcctgctgttgacaggatttgcgtgggcattcctcctggtgagtgctttgggctcctgggagttaatggggctggaaaatcatcaactttcaagatgttaacaggagataccactgttaccagaggagatgctttccttaacagaaatagtatcttatcaaacatccatgaagtacatcagaacatgggctactgccctcagtttgatgccatcacagagctgttgactgggagagaacacgtggagttctttgcccttttgagaggagtcccagagaaagaagttggcaaggttggtgagtgggcgattcggaaactgggcctcgtgaagtatggagaaaaatatgctggtaactatagtggaggcaacaaacgcaagctctctacagccatggctttgatcggcgggcctcctgtggtgtttctggatgaacccaccacaggcatggatcccaaagcccggcggttcttgtggaattgtgccctaagtgttgtcaaggaggggagatcagtagtgcttacatctcatagtatggaagaatgtgaagctctttgcactaggatggcaatcatggtcaatggaaggttcaggtgccttggcagtgtccagcatctaaaaaataggtttggagatggttatacaatagttgtacgaatagcagggtccaacccggacctgaagcctgtccaggatttctttggacttgcatttcctggaagtgttccaaaagagaaacaccggaacatgctacaataccagcttccatcttcattatcttctctggccaggatattcagcatcctctcccagagcaaaaagcgactccacatagaagactactctgtttctcagacaacacttgaccaagtatttgtgaactttgccaaggaccaaagtgatgatgaccacttaaaagacctctcattacacaaaaaccagacagtagtggacgttgcagttctcacatcttttctacaggatgagaaagtgaaagaaagctatgtatgaagaatcctgttcatacggggtggctgaaagtaaagaggnactagactttcctttgcaccatgtgaagtgttgtggagaaaagagccagaagttgatgtgggaagaagtaaactggatactgtactgatactattcaatgcaatgcaattcaatgcaatgaaaacaaaattccattacaggggcagtgcctttgtagcctatgtcttgtatggctctcaagtgaaagacttgaatttagttttttacctatacctatgtgaaactctattatggaacccaatggacatatgggtttgaactcacactttttttttttttttgttcctgtgtattctcattggggttgcaacaataattcatcaagtaatcatggccagcgattattgatcaaaatcaaaaggtaatgcacatcctcattcactaagccatgccatgcccaggagactggtttcccggtgacacatccattgctggcaatgagtgtgccagagttattagtgccaagtttttcagaaagtttgaagcaccatggtgtgtcatgctcacttttgtgaaagctgctctgctcagagtctatcaacattgaatatcagttgacagaatggtgccatgcgtggctaacatcctgctttgattccctctgataagctgttctggtggcagtaacatgcaacaaaaatgtgggtgtctctaggcacgggaaacttggttccattgttatattgtcctatgcttcgagccatgggtctacagggtcatccttatgagactcttaaatatacttagatcctggtaagaggcaaagaatcaacagccaaactgctggggctgcaagctgctgaagccagggcatgggattaaagagattgtgcgttcaaacctagggaagcctgtgcccatttgtcctgactgtctgctaacatggtacactgcatctcaagatgtttatctgacacaagtgtattatttctggctttttgaattaatctagaaaatgaaaagatggagttgtattttgacaaaaatgtttgtactttttaatgttatttggaattttaagttctatcagtgacttctgaatccttagaatggcctctttgtagaaccctgtggtatagaggagtatggccactgccccactatttttattttcttatgtaagtttgcatatcagtcatgactagtgcctagaaagcaatgtgatggtcaggatctcatgacattatatttgagtttctttcagatcatttaggatactcttaatctcacttcatcaatcaaatattttttgagtgtatgctgtagctgaaagagtatgtacgtacgtataagactagagagatattaagtctcagtacacttcctgtgccatgttattcagctcactggtttacaaatataggttgtcttgtggttgtaggagcccactgtaacaatactgggcagcctttttttttttttttaattgcaacaatgcaaaagccaagaaagtataagggtcacaagtctaaacaatgaattcttcaacagggaaaacagctagcttgaaaacttgctgaaaaacacaacttgtgtttatggcatttagtaccttcaaataattggctttgcagatattggataccccattaaatctgacagtctcaaatttttcatctcttcaatcactagtcaagaaaaatataaaaacaacaaatacttccatatggagcatttttcagagttttctaacccagtcttatttttctagtcagtaaacatttgtaaaaatactgtttcactaatacttactgttaactgtcttgagagaaaagaaaaatatgagagaactattgtttggggaagttcaagtgatctttcaatatcattactaacttcttccactttttccaaaatttgaatattaacgctaaaggtgtaagacttcagatttcaaattaatctttctatattttttaaatttacagaatattatataacccactgctgaaaaagaaaaaaatgattgttttagaagttaaagtcaatattgattttaaatataagtaatgaaggcatatttccaataactagtgatatggcatcgttgcattttacagtatcttcaaaaatacagaatttatagaataatttctcctcatttaatatttttcaaaatcaaagttatggtttcctcattttactaaaatcgtattctaattcttcattatagtaaatctatgagcaactccttacttcggttcctctgatttcaaggccatattttaaaaaatcaaaaggcactgtgaactattttgaagaaaacacaacattttaatacagattgaaaggacctcttctgaagctagaaacaatctatagttatacatcttcattaatactgtgttaccttttaaaatagtaattttttacattttcctgtgtaaacctaattgtggtagaaatttttaccaactctatactcaatcaagcaaaatttctgtatattccctgtggaatgtacctatgtgagtttcagaaattctcaaaatacgtgttcaaaaatttctgcttttgcatctttgggacacctcagaaaacttattaacaactgtgaatatgagaaatacagaagaaaataataagccctctatacataaatgcccagcacaattcattgttaaaaaacaaccaaacctcacactactgtatttcattatctgtactgaaagcaaatgctttgtgactattaaatgttgcacatcattcattcaaaaaaaaaaaaaaaaaaa

SEQ ID NO: 112 - DNA, 9870 bp, Homo sapiens
  modified_base (7138): a, t, c or g
gtaattgcgagcgagagtgagtggggccgggacccgcagagccgagccgacccttctctcccgggctgcggcagggcagggcggggagctccgcgcaccaacagagccggttctcagggcgctttgctccttgttttttccccggttctgttttctccccttctccggaaggcttgtcaaggggtaggagaaagagacgcaaacacaaaagtggaaaacagttaatgaccagccacggcgtccctgctgtgagctctggccgctgccttccagggctcccgagccacacgctgggggtgctggctgagggaacatggcttgttggcctcagctgaggttgctgctgtggaagaacctcactttcagaagaagacaaacatgtcagctgctgctggaagtggcctggcctctatttatcttcctgatcctgatctctgttcggctgagctacccaccctatgaacaacatgaatgccattttccaaataaagccatgccctctgcaggaacacttccttgggttcaggggattatctgtaatgccaacaacccctgtttccgttacccgactcctggggaggctcccggagttgttggaaactttaacaaatccattgtggctcgcctgttctcagatgctcggaggcttcttttatacagccagaaagacaccagcatgaaggacatgcgcaaagttctgagaacattacagcagatcaagaaatccagctcaaacttgaagcttcaagatttcctggtggacaatgaaaccttctctgggttcctgtatcacaacctctctctcccaaagtctactgtggacaagatgctgagggctgatgtcattctccacaaggtatttttgcaaggctaccagttacatttgacaagtctgtgcaatggatcaaaatcagaagagatgattcaacttggtgaccaagaagtttctgagctttgtggcctaccaagggagaaactggctgcagcagagcgagtacttcgttccaacatggacatcctgaagccaatcctgagaacactaaactctacatctcccttcccgagcaaggagctggccgaagccacaaaaacattgctgcatagtcttgggactctggcccaggagctgttcagcatgagaagctggagtgacatgcgacaggaggtgatgtttctgaccaatgtgaacagctccagctcctccacccaaatctaccaggctgtgtctcgtattgtctgcgggcatcccgagggaggggggctgaagatcaagtctctcaactggtatgaggacaacaactacaaagccctctttggaggcaatggcactgaggaagatgctgaaaccttctatgacaactctacaactccttactgcaatgatttgatgaagaatttggagtctagtcctctttcccgcattatctggaaagctctgaagccgctgctcgttgggaagatcctgtatacacctgacactccagccacaaggcaggtcatggctgaggtgaacaagaccttccaggaactggctgtgttccatgatctggaaggcatgtgggaggaactcagccccaagatctggaccttcatggagaacagccaagaaatggaccttgtccggatgctgttggacagcagggacaatgaccacttttgggaacagcagttggatggcttagattggacagcccaagacatcgtggcgtttttggccaagcacccagaggatgtccagtccagtaatggttctgtgtacacctggagagaagctttcaacgagactaaccaggcaatccggaccatatctcgcttcatggagtgtgtcaacctgaacaagctagaacccatagcaacagaagtctggctcatcaacaagtccatggagctgctggatgagaggaagttctgggctggtattgtgttcactggaattactccaggcagcattgagctgccccatcatgtcaagtacaagatccgaatggacattgacaatgtggagaggacaaataaaatcaaggatgggtactgggaccctggtcctcgagctgacccctttgaggacatgcggtacgtctgggggggcttcgcctacttgcaggatgtggtggagcaggcaatcatcagggtgctgacgggcaccgagaagaaaactggtgtctatatgcaacagatgccctatccctgttacgttgatgacatctttctgcgggtgatgagccggtcaatgcccctcttcatgacgctggcctggatttactcagtggctgtgatcatcaagggcatcgtgtatgagaaggaggcacggctgaaagagaccatgcggatcatgggcctggacaacagcatcctctggtttagctggttcattagtagcctcattcctcttcttgtgagcgctggcctgctagtggtcatcctgaagttaggaaacctgctgccctacagtgatcccagcgtggtgtttgtcttcctgtccgtgtttgctgtggtgacaatcctgcagtgcttcctgattagcacactcttctccagagccaacctggcagcagcctgtgggggcatcatctacttcacgctgtacctgccctacgtcctgtgtgtggcatggcaggactacgtgggcttcacactcaagatcttcgctagcctgctgtctcctgtggcttttgggtttggctgtgagtactttgccctttttgaggagcagggcattggagtgcagtgggacaacctgtttgagagtcctgtggaggaagatggcttcaatctcaccacttcggtctccatgatgctgtttgacaccttcctctatggggtgatgacctggtacattgaggctgtctttccaggccagtacggaattcccaggccctggtattttccttgcaccaagtcctactggtttggcgaggaaagtgatgagaagagccaccctggttccaaccagaagagaatatcagaaatctgcatggaggaggaacccacccacttgaagctgggcgtgtccattcagaacctggtaaaagtctaccgagatgggatgaaggtggctgtcgatggcctggcactgaatttttatgagggccagatcacctccttcctgggccacaatggagcggggaagacgaccaccatgtcaatcctgaccgggttgttccccccgacctcgggcaccgcctacatcctgggaaaagacattcgctctgagatgagcaccatccggcagaacctgggggtctgtccccagcataacgtgctgtttgacatgctgactgtcgaagaacacatctggttctatgcccgcttgaaagggctctctgagaagcacgtgaaggcggagatggagcagatggccctggatgttggtttgccatcaagcaagctgaaaagcaaaacaagccagctgtcaggtggaatgcagagaaagctatctgtggccttggcctttgtcgggggatctaaggttgtcattctggatgaacccacagctggtgtggacccttactcccgcaggggaatatgggagctgctgctgaaataccgacaaggccgcaccattattctctctacacaccacatggatgaagcggacgtcctgggggacaggattgccatcatctcccatgggaagctgtgctgtgtgggctcctccctgtttctgaagaaccagctgggaacaggctactacctgaccttggtcaagaaagatgtggaatcctccctcagttcctgcagaaacagtagtagcactgtgtcatacctgaaaaaggaggacagtgtttctcagagcagttctgatgctggcctgggcagcgaccatgagagtgacacgctgaccatcgatgtctctgctatctccaacctcatcaggaagcatgtgtctgaagcccggctggtggaagacatagggcatgagctgacctatgtgctgccatatgaagctgctaaggagggagcctttgtggaactctttcatgagattgatgaccggctctcagacctgggcatttctagttatggcatctcagagacgaccctggaagaaatattcctcaaggtggccgaagagagtggggtggatgctgagacctcagatggtaccttgccagcaagacgaaacaggcgggccttcggggacaagcagagctgtcttcgcccgttcactgaagatgatgctgctgatccaaatgattctgacatagacccagaatccagagagacagacttgctcagtgggatggatggcaaaggatcctaccaggtgaaaggctggaaacttacacagcaacagtttgtggcccttttgtggaagagactgctaattgccagacggagtcggaaaggattttttgctcagattgtcttgccagctgtgtttgtctgcattgcccttgtgttcagcctgatcgtgccaccctttggcaagtaccccagcctggaacttcagccctggatgtacaacgaacagtacacatttgtcagcaatgatgctcctgaggacacgggaaccctggaactcttaaacgccctcaccaaagaccctggcttcgggacccgctgtatggaaggaaacccaatcccagacacgccctgccaggcaggggaggaagagtggaccactgccccagttccccagaccatcatggacctcttccagaatgggaactggacaatgcagaacccttcacctgcatgccagtgtagcagcgacaaaatcaagaagatgctgcctgtgtgtcccccaggggcaggggggctgcctcctccacaaagaaaacaaaacactgcagatatccttcaggacctgacaggaagaaacatttcggattatctggtgaagacgtatgtgcagatcatagccaaaagcttaaagaacaagatctgggtgaatgagtttaggtatggcggcttttccctgggtgtcagtaatactcaagcacttcctccgagtcaagaagttaatgatgccaccaaacaaatgaagaaacacctaaagctggccaaggacagttctgcagatcgatttctcaacagcttgggaagatttatgacaggactggacaccagaaataatgtcaaggtgtggttcaataacaagggctggcatgcaatcagctctttcctgaatgtcatcaacaatgccattctccgggccaacctgcaaaagggagagaaccctagccattatggaattactgctttcaatcatcccctgaatctcaccaagcagcagctctcagaggtggctccgatgaccacatcagtggatgtccttgtgtccatctgtgtcatctttgcaatgtccttcgtcccagccagctttgtcgtattcctgatccaggagcgggtcagcaaagcaaaacacctgcagttcatcagtggagtgaagcctgtcatctactggctctctaattttgtctgggatatgtgcaattacgttgtccctgccacactggtcattatcatcttcatctgcttccagcagaagtcctatgtgtcctccaccaatctgcctgtgctagcccttctacttttgctgtatgggtggtcaatcacacctctcatgtacccagcctcctttgtgttcaagatccccagcacagcctatgtggtgctcaccagcgtgaacctcttcattggcattaatggcagcgtggccacctttgtgctggagctgttcaccgacaataagctgaataatatcaatgatatcctgaagtccgtgttcttgatcttcccacatttttgcctgggacgagggctcatcgacatggtgaaaaaccaggcaatggctgatgccctggaaaggtttggggagaatcgctttgtgtcaccattatcttgggacttggtgggacgaaacctcttcgccatggccgtggaaggggtggtgttcttcctcattactgttctgatccagtacagattcttcatcaggcccagacctgtaaatgcaaagctatctcctctgaatgatgaagatgaagatgtgaggcgggaaagacagagaattcttgatggtggaggccagaatgacatcttagaaatcaaggagttgacgaagatatatagaaggaagcggaagcctgctgttgacaggatttgcgtgggcattcctcctggtgagtgctttgggctcctgggagttaatggggctggaaaatcatcaactttcaagatgttaacaggagataccactgttaccagaggagatgctttccttaacagaaatagtatcttatcaaacatccatgaagtacatcagaacatgggctactgccctcagtttgatgccatcacagagctgttgactgggagagaacacgtggagttctttgcccttttgagaggagtcccagagaaagaagttggcaaggttggtgagtgggcgattcggaaactgggcctcgtgaagtatggagaaaaatatgctggtaactatagtggaggcaacaaacgcaagctctctacagccatggctttgatcggcgggcctcctgtggtgtttctggatgaacccaccacaggcatggatcccaaagcccggcggttcttgtggaattgtgccctaagtgttgtcaaggaggggagatcagtagtgcttacatctcatagtatggaagaatgtgaagctctttgcactaggatggcaatcatggtcaatggaaggttcaggtgccttggcagtgtccagcatctaaaaaataggtttggagatggttatacaatagttgtacgaatagcagggtccaacccggacctgaagcctgtccaggatttctttggacttgcatttcctggaagtgttccaaaagagaaacaccggaacatgctacaataccagcttccatcttcattatcttctctggccaggatattcagcatcctctcccagagcaaaaagcgactccacatagaagactactctgtttctcagacaacacttgaccaagtatttgtgaactttgccaaggaccaaagtgatgatgaccacttaaaagacctctcattacacaaaaaccagacagtagtggacgttgcagttctcacatcttttctacaggatgagaaagtgaaagaaagctatgtatgaagaatcctgttcatacggggtggctgaaagtaaagaggnactagactttcctttgcaccatgtgaagtgttgtggagaaaagagccagaagttgatgtgggaagaagtaaactggatactgtactgatactattcaatgcaatgcaattcaatgcaatgaaaacaaaattccattacaggggcagtgcctttgtagcctatgtcttgtatggctctcaagtgaaagacttgaatttagttttttacctatacctatgtgaaactctattatggaacccaatggacatatgggtttgaactcacactttttttttttttttgttcctgtgtattctcattggggttgcaacaataattcatcaagtaatcatggccagcgattattgatcaaaatcaaaaggtaatgcacatcctcattcactaagccatgccatgcccaggagactggtttcccggtgacacatccattgctggcaatgagtgtgccagagttattagtgccaagtttttcagaaagtttgaagcaccatggtgtgtcatgctcacttttgtgaaagctgctctgctcagagtctatcaacattgaatatcagttgacagaatggtgccatgcgtggctaacatcctgctttgattccctctgataagctgttctggtggcagtaacatgcaacaaaaatgtgggtgtctctaggcacgggaaacttggttccattgttatattgtcctatgcttcgagccatgggtctacagggtcatccttatgagactcttaaatatacttagatcctggtaagaggcaaagaatcaacagccaaactgctggggctgcaagctgctgaagccagggcatgggattaaagagattgtgcgttcaaacctagggaagcctgtgcccatttgtcctgactgtctgctaacatggtacactgcatctcaagatgtttatctgacacaagtgtattatttctggctttttgaattaatctagaaaatgaaaagatggagttgtattttgacaaaaatgtttgtactttttaatgttatttggaattttaagttctatcagtgacttctgaatccttagaatggcctctttgtagaaccctgtggtatagaggagtatggccactgccccactatttttattttcttatgtaagtttgcatatcagtcatgactagtgcctagaaagcaatgtgatggtcaggatctcatgacattatatttgagtttctttcagatcatttaggatactcttaatctcacttcatcaatcaaatattttttgagtgtatgctgtagctgaaagagtatgtacgtacgtataagactagagagatattaagtctcagtacacttcctgtgccatgttattcagctcactggtttacaaatataggttgtcttgtggttgtaggagcccactgtaacaatactgggcagcctttttttttttttttaattgcaacaatgcaaaagccaagaaagtataagggtcacaagtctaaacaatgaattcttcaacagggaaaacagctagcttgaaaacttgctgaaaaacacaacttgtgtttatggcatttagtaccttcaaataattggctttgcagatattggataccccattaaatctgacagtctcaaatttttcatctcttcaatcactagtcaagaaaaatataaaaacaacaaatacttccatatggagcatttttcagagttttctaacccagtcttatttttctagtcagtaaacatttgtaaaaatactgtttcactaatacttactgttaactgtcttgagagaaaagaaaaatatgagagaactattgtttggggaagttcaagtgatctttcaatatcattactaacttcttccactttttccaaaatttgaatattaacgctaaaggtgtaagacttcagatttcaaattaatctttctatattttttaaatttacagaatattatataacccactgctgaaaaagaaaaaaatgattgttttagaagttaaagtcaatattgattttaaatataagtaatgaaggcatatttccaataactagtgatatggcatcgttgcattttacagtatcttcaaaaatacagaatttatagaataatttctcctcatttaatatttttcaaaatcaaagttatggtttcctcattttactaaaatcgtattctaattcttcattatagtaaatctatgagcaactccttacttcggttcctctgatttcaaggccatattttaaaaaatcaaaaggcactgtgaactattttgaagaaaacacaacattttaatacagattgaaaggacctcttctgaagctagaaacaatctatagttatacatcttcattaatactgtgttaccttttaaaatagtaattttttacattttcctgtgtaaacctaattgtggtagaaatttttaccaactctatactcaatcaagcaaaatttctgtatattccctgtggaatgtacctatgtgagtttcagaaattctcaaaatacgtgttcaaaaatttctgcttttgcatctttgggacacctcagaaaacttattaacaactgtgaatatgagaaatacagaagaaaataataagccctctatacataaatgcccagcacaattcattgttaaaaaacaaccaaacctcacactactgtatttcattatctgtactgaaagcaaatgctttgtgactattaaatgttgcacatcattcattcaaaaaaaaaaaaaaaaaaa

SEQ ID NO: 113 - DNA, 9870 bp, Homo sapiens
  modified_base (7138): a, t, c or g
gtaattgcgagcgagagtgagtggggccgggacccgcagagccgagccgacccttctctcccgggctgcggcagggcagggcggggagctccgcgcaccaacagagccggttctcagggcgctttgctccttgttttttccccggttctgttttctccccttctccggaaggcttgtcaaggggtaggagaaagagacgcaaacacaaaagtggaaaacagttaatgaccagccacggcgtccctgctgtgagctctggccgctgccttccagggctcccgagccacacgctgggggtgctggctgagggaacatggcttgttggcctcagctgaggttgctgctgtggaagaacctcactttcagaagaagacaaacatgtcagctgctgctggaagtggcctggcctctatttatcttcctgatcctgatctctgttcggctgagctacccaccctatgaacaacatgaatgccattttccaaataaagccatgccctctgcaggaacacttccttgggttcaggggattatctgtaatgccaacaacccctgtttccgttacccgactcctggggaggctcccggagttgttggaaactttaacaaatccattgtggctcgcctgttctcagatgctcggaggcttcttttatacagccagaaagacaccagcatgaaggacatgcgcaaagttctgagaacattacagcagatcaagaaatccagctcaaacttgaagcttcaagatttcctggtggacaatgaaaccttctctgggttcctgtatcacaacctctctctcccaaagtctactgtggacaagatgctgagggctgatgtcattctccacaaggtatttttgcaaggctaccagttacatttgacaagtctgtgcaatggatcaaaatcagaagagatgattcaacttggtgaccaagaagtttctgagctttgtggcctaccaagggagaaactggctgcagcagagcgagtacttcgttccaacatggacatcctgaagccaatcctgagaacactaaactctacatctcccttcccgagcaaggagctggccgaagccacaaaaacattgctgcatagtcttgggactctggcccaggagctgttcagcatgagaagctggagtgacatgcgacaggaggtgatgtttctgaccaatgtgaacagctccagctcctccacccaaatctaccaggctgtgtctcgtattgtctgcgggcatcccgagggaggggggctgaagatcaagtctctcaactggtatgaggacaacaactacaaagccctctttggaggcaatggcactgaggaagatgctgaaaccttctatgacaactctacaactccttactgcaatgatttgatgaagaatttggagtctagtcctctttcccgcattatctggaaagctctgaagccgctgctcgttgggaagatcctgtatacacctgacactccagccacaaggcaggtcatggctgaggtgaacaagaccttccaggaactggctgtgttccatgatctggaaggcatgtgggaggaactcagccccaagatctggaccttcatggagaacagccaagaaatggaccttgtccggatgctgttggacagcagggacaatgaccacttttgggaacagcagttggatggcttagattggacagcccaagacatcgtggcgtttttggccaagcacccagaggatgtccagtccagtaatggttctgtgtacacctggagagaagctttcaacgagactaaccaggcaatccggaccatatctcgcttcatggagtgtgtcaacctgaacaagctagaacccatagcaacagaagtctggctcatcaacaagtccatggagctgctggatgagaggaagttctgggctggtattgtgttcactggaattactccaggcagcattgagctgccccatcatgtcaagtacaagatccgaatggacattgacaatgtggagaggacaaataaaatcaaggatgggtactgggaccctggtcctcgagctgacccctttgaggacatgcggtacgtctgggggggcttcgcctacttgcaggatgtggtggagcaggcaatcatcagggtgctgacgggcaccgagaagaaaactggtgtctatatgcaacagatgccctatccctgttacgttgatgacatctttctgcgggtgatgagccggtcaatgcccctcttcatgacgctggcctggatttactcagtggctgtgatcatcaagggcatcgtgtatgagaaggaggcacggctgaaagagaccatgcggatcatgggcctggacaacagcatcctctggtttagctggttcattagtagcctcattcctcttcttgtgagcgctggcctgctagtggtcatcctgaagttaggaaacctgctgccctacagtgatcccagcgtggtgtttgtcttcctgtccgtgtttgctgtggtgacaatcctgcagtgcttcctgattagcacactcttctccagagccaacctggcagcagcctgtgggggcatcatctacttcacgctgtacctgccctacgtcctgtgtgtggcatggcaggactacgtgggcttcacactcaagatcttcgctagcctgctgtctcctgtggcttttgggtttggctgtgagtactttgccctttttgaggagcagggcattggagtgcagtgggacaacctgtttgagagtcctgtggaggaagatggcttcaatctcaccacttcggtctccatgatgctgtttgacaccttcctctatggggtgatgacctggtacattgaggctgtctttccaggccagtacggaattcccaggccctggtattttccttgcaccaagtcctactggtttggcgaggaaagtgatgagaagagccaccctggttccaaccagaagagaatatcagaaatctgcatggaggaggaacccacccacttgaagctgggcgtgtccattcagaacctggtaaaagtctaccgagatgggatgaaggtggctgtcgatggcctggcactgaatttttatgagggccagatcacctccttcctgggccacaatggagcggggaagacgaccaccatgtcaatcctgaccgggttgttccccccgacctcgggcaccgcctacatcctgggaaaagacattcgctctgagatgagcaccatccggcagaacctgggggtctgtccccagcataacgtgctgtttgacatgctgactgtcgaagaacacatctggttctatgcccgcttgaaagggctctctgagaagcacgtgaaggcggagatggagcagatggccctggatgttggtttgccatcaagcaagctgaaaagcaaaacaagccagctgtcaggtggaatgcagagaaagctatctgtggccttggcctttgtcgggggatctaaggttgtcattctggatgaacccacagctggtgtggacccttactcccgcaggggaatatgggagctgctgctgaaataccgacaaggccgcaccattattctctctacacaccacatggatgaagcggacgtcctgggggacaggattgccatcatctcccatgggaagctgtgctgtgtgggctcctccctgtttctgaagaaccagctgggaacaggctactacctgaccttggtcaagaaagatgtggaatcctccctcagttcctgcagaaacagtagtagcactgtgtcatacctgaaaaaggaggacagtgtttctcagagcagttctgatgctggcctgggcagcgaccatgagagtgacacgctgaccatcgatgtctctgctatctccaacctcatcaggaagcatgtgtctgaagcccggctggtggaagacatagggcatgagctgacctatgtgctgccatatgaagctgctaaggagggagcctttgtggaactctttcatgagattgatgaccggctctcagacctgggcatttctagttatggcatctcagagacgaccctggaagaaatattcctcaaggtggccgaagagagtggggtggatgctgagacctcagatggtaccttgccagcaagacgaaacaggcgggccttcggggacaagcagagctgtcttcgcccgttcactgaagatgatgctgctgatccaaatgattctgacatagacccagaatccagagagacagacttgctcagtgggatggatggcaaagggtcctaccaggtgaaaggctggaaacttacacagcaacagtttgtggcccttttgtggaagagactgctaattgccagacggagtcggaaaggattttttgctcagattgtcttgccagctgtgtttgtctgcattgcccttgtgttcagcctgatcgtgccaccctttggcaagtaccccagcctggaacttcagccctggatgtacaacgaacagtacacatttgtcagcaatgatgctcctgaggacacgggaaccctggaactcttaaacgccctcaccaaagaccctggcttcgggacccgctgtatggaaggaaacccaatcccagacacaccctgccaggcaggggaggaagagtggaccactgccccagttccccagaccatcatggacctcttccagaatgggaactggacaatgcagaacccttcacctgcatgccagtgtagcagcgacaaaatcaagaagatgctgcctgtgtgtcccccaggggcaggggggctgcctcctccacaaagaaaacaaaacactgcagatatccttcaggacctgacaggaagaaacatttcggattatctggtgaagacgtatgtgcagatcatagccaaaagcttaaagaacaagatctgggtgaatgagtttaggtatggcggcttttccctgggtgtcagtaatactcaagcacttcctccgagtcaagaagttaatgatgccaccaaacaaatgaagaaacacctaaagctggccaaggacagttctgcagatcgatttctcaacagcttgggaagatttatgacaggactggacaccagaaataatgtcaaggtgtggttcaataacaagggctggcatgcaatcagctctttcctgaatgtcatcaacaatgccattctccgggccaacctgcaaaagggagagaaccctagccattatggaattactgctttcaatcatcccctgaatctcaccaagcagcagctctcagaggtggctccgatgaccacatcagtggatgtccttgtgtccatctgtgtcatctttgcaatgtccttcgtcccagccagctttgtcgtattcctgatccaggagcgggtcagcaaagcaaaacacctgcagttcatcagtggagtgaagcctgtcatctactggctctctaattttgtctgggatatgtgcaattacgttgtccctgccacactggtcattatcatcttcatctgcttccagcagaagtcctatgtgtcctccaccaatctgcctgtgctagcccttctacttttgctgtatgggtggtcaatcacacctctcatgtacccagcctcctttgtgttcaagatccccagcacagcctatgtggtgctcaccagcgtgaacctcttcattggcattaatggcagcgtggccacctttgtgctggagctgttcaccgacaataagctgaataatatcaatgatatcctgaagtccgtgttcttgatcttcccacatttttgcctgggacgagggctcatcgacatggtgaaaaaccaggcaatggctgatgccctggaaaggtttggggagaatcgctttgtgtcaccattatcttgggacttggtgggacgaaacctcttcgccatggccgtggaaggggtggtgttcttcctcattactgttctgatccagtacagattcttcatcaggcccagacctgtaaatgcaaagctatctcctctgaatgatgaagatgaagatgtgaggcgggaaagacagagaattcttgatggtggaggccagaatgacatcttagaaatcaaggagttgacgaagatatatagaaggaagcggaagcctgctgttgacaggatttgcgtgggcattcctcctggtgagtgctttgggctcctgggagttaatggggctggaaaatcatcaactttcaagatgttaacaggagataccactgttaccagaggagatgctttccttaacagaaatagtatcttatcaaacatccatgaagtacatcagaacatgggctactgccctcagtttgatgccatcacagagctgttgactgggagagaacacgtggagttctttgcccttttgagaggagtcccagagaaagaagttggcaaggttggtgagtgggcgattcggaaactgggcctcgtgaagtatggagaaaaatatgctggtaactatagtggaggcaacaaacgcaagctctctacagccatggctttgatcggcgggcctcctgtggtgtttctggatgaacccaccacaggcatggatcccaaagcccggcggttcttgtggaattgtgccctaagtgttgtcaaggaggggagatcagtagtgcttacatctcatagtatggaagaatgtgaagctctttgcactaggatggcaatcatggtcaatggaaggttcaggtgccttggcagtgtccagcatctaaaaaataggtttggagatggttatacaatagttgtacgaatagcagggtccaacccggacctgaagcctgtccaggatttctttggacttgcatttcctggaagtgttccaaaagagaaacaccggaacatgctacaataccagcttccatcttcattatcttctctggccaggatattcagcatcctctcccagagcaaaaagcgactccacatagaagactactctgtttctcagacaacacttgaccaagtatttgtgaactttgccaaggaccaaagtgatgatgaccacttaaaagacctctcattacacaaaaaccagacagtagtggacgttgcagttctcacatcttttctacaggatgagaaagtgaaagaaagctatgtatgaagaatcctgttcatacggggtggctgaaagtaaagaggnactagactttcctttgcaccatgtgaagtgttgtggagaaaagagccagaagttgatgtgggaagaagtaaactggatactgtactgatactattcaatgcaatgcaattcaatgcaatgaaaacaaaattccattacaggggcagtgcctttgtagcctatgtcttgtatggctctcaagtgaaagacttgaatttagttttttacctatacctatgtgaaactctattatggaacccaatggacatatgggtttgaactcacactttttttttttttttgttcctgtgtattctcattggggttgcaacaataattcatcaagtaatcatggccagcgattattgatcaaaatcaaaaggtaatgcacatcctcattcactaagccatgccatgcccaggagactggtttcccggtgacacatccattgctggcaatgagtgtgccagagttattagtgccaagtttttcagaaagtttgaagcaccatggtgtgtcatgctcacttttgtgaaagctgctctgctcagagtctatcaacattgaatatcagttgacagaatggtgccatgcgtggctaacatcctgctttgattccctctgataagctgttctggtggcagtaacatgcaacaaaaatgtgggtgtctctaggcacgggaaacttggttccattgttatattgtcctatgcttcgagccatgggtctacagggtcatccttatgagactcttaaatatacttagatcctggtaagaggcaaagaatcaacagccaaactgctggggctgcaagctgctgaagccagggcatgggattaaagagattgtgcgttcaaacctagggaagcctgtgcccatttgtcctgactgtctgctaacatggtacactgcatctcaagatgtttatctgacacaagtgtattatttctggctttttgaattaatctagaaaatgaaaagatggagttgtattttgacaaaaatgtttgtactttttaatgttatttggaattttaagttctatcagtgacttctgaatccttagaatggcctctttgtagaaccctgtggtatagaggagtatggccactgccccactatttttattttcttatgtaagtttgcatatcagtcatgactagtgcctagaaagcaatgtgatggtcaggatctcatgacattatatttgagtttctttcagatcatttaggatactcttaatctcacttcatcaatcaaatattttttgagtgtatgctgtagctgaaagagtatgtacgtacgtataagactagagagatattaagtctcagtacacttcctgtgccatgttattcagctcactggtttacaaatataggttgtcttgtggttgtaggagcccactgtaacaatactgggcagcctttttttttttttttaattgcaacaatgcaaaagccaagaaagtataagggtcacaagtctaaacaatgaattcttcaacagggaaaacagctagcttgaaaacttgctgaaaaacacaacttgtgtttatggcatttagtaccttcaaataattggctttgcagatattggataccccattaaatctgacagtctcaaatttttcatctcttcaatcactagtcaagaaaaatataaaaacaacaaatacttccatatggagcatttttcagagttttctaacccagtcttatttttctagtcagtaaacatttgtaaaaatactgtttcactaatacttactgttaactgtcttgagagaaaagaaaaatatgagagaactattgtttggggaagttcaagtgatctttcaatatcattactaacttcttccactttttccaaaatttgaatattaacgctaaaggtgtaagacttcagatttcaaattaatctttctatattttttaaatttacagaatattatataacccactgctgaaaaagaaaaaaatgattgttttagaagttaaagtcaatattgattttaaatataagtaatgaaggcatatttccaataactagtgatatggcatcgttgcattttacagtatcttcaaaaatacagaatttatagaataatttctcctcatttaatatttttcaaaatcaaagttatggtttcctcattttactaaaatcgtattctaattcttcattatagtaaatctatgagcaactccttacttcggttcctctgatttcaaggccatattttaaaaaatcaaaaggcactgtgaactattttgaagaaaacacaacattttaatacagattgaaaggacctcttctgaagctagaaacaatctatagttatacatcttcattaatactgtgttaccttttaaaatagtaattttttacattttcctgtgtaaacctaattgtggtagaaatttttaccaactctatactcaatcaagcaaaatttctgtatattccctgtggaatgtacctatgtgagtttcagaaattctcaaaatacgtgttcaaaaatttctgcttttgcatctttgggacacctcagaaaacttattaacaactgtgaatatgagaaatacagaagaaaataataagccctctatacataaatgcccagcacaattcattgttaaaaaacaaccaaacctcacactactgtatttcattatctgtactgaaagcaaatgctttgtgactattaaatgttgcacatcattcattcaaaaaaaaaaaaaaaaaaa

SEQ ID NO: 114 - DNA, 9870 bp, Homo sapiens
  modified_base (7138): a, t, c or g
gtaattgcgagcgagagtgagtggggccgggacccgcagagccgagccgacccttctctcccgggctgcggcagggcagggcggggagctccgcgcaccaacagagccggttctcagggcgctttgctccttgttttttccccggttctgttttctccccttctccggaaggcttgtcaaggggtaggagaaagagacgcaaacacaaaagtggaaaacagttaatgaccagccacggcgtccctgctgtgagctctggccgctgccttccagggctcccgagccacacgctgggggtgctggctgagggaacatggcttgttggcctcagctgaggttgctgctgtggaagaacctcactttcagaagaagacaaacatgtcagctgctgctggaagtggcctggcctctatttatcttcctgatcctgatctctgttcggctgagctacccaccctatgaacaacatgaatgccattttccaaataaagccatgccctctgcaggaacacttccttgggttcaggggattatctgtaatgccaacaacccctgtttccgttacccgactcctggggaggctcccggagttgttggaaactttaacaaatccattgtggctcgcctgttctcagatgctcggaggcttcttttatacagccagaaagacaccagcatgaaggacatgcgcaaagttctgagaacattacagcagatcaagaaatccagctcaaacttgaagcttcaagatttcctggtggacaatgaaaccttctctgggttcctgtatcacaacctctctctcccaaagtctactgtggacaagatgctgagggctgatgtcattctccacaaggtatttttgcaaggctaccagttacatttgacaagtctgtgcaatggatcaaaatcagaagagatgattcaacttggtgaccaagaagtttctgagctttgtggcctaccaagggagaaactggctgcagcagagcgagtacttcgttccaacatggacatcctgaagccaatcctgagaacactaaactctacatctcccttcccgagcaaggagctggccgaagccacaaaaacattgctgcatagtcttgggactctggcccaggagctgttcagcatgagaagctggagtgacatgcgacaggaggtgatgtttctgaccaatgtgaacagctccagctcctccacccaaatctaccaggctgtgtctcgtattgtctgcgggcatcccgagggaggggggctgaagatcaagtctctcaactggtatgaggacaacaactacaaagccctctttggaggcaatggcactgaggaagatgctgaaaccttctatgacaactctacaactccttactgcaatgatttgatgaagaatttggagtctagtcctctttcccgcattatctggaaagctctgaagccgctgctcgttgggaagatcctgtatacacctgacactccagccacaaggcaggtcatggctgaggtgaacaagaccttccaggaactggctgtgttccatgatctggaaggcatgtgggaggaactcagccccaagatctggaccttcatggagaacagccaagaaatggaccttgtccggatgctgttggacagcagggacaatgaccacttttgggaacagcagttggatggcttagattggacagcccaagacatcgtggcgtttttggccaagcacccagaggatgtccagtccagtaatggttctgtgtacacctggagagaagctttcaacgagactaaccaggcaatccggaccatatctcgcttcatggagtgtgtcaacctgaacaagctagaacccatagcaacagaagtctggctcatcaacaagtccatggagctgctggatgagaggaagttctgggctggtattgtgttcactggaattactccaggcagcattgagctgccccatcatgtcaagtacaagatccgaatggacattgacaatgtggagaggacaaataaaatcaaggatgggtactgggaccctggtcctcgagctgacccctttgaggacatgcggtacgtctgggggggcttcgcctacttgcaggatgtggtggagcaggcaatcatcagggtgctgacgggcaccgagaagaaaactggtgtctatatgcaacagatgccctatccctgttacgttgatgacatctttctgcgggtgatgagccggtcaatgcccctcttcatgacgctggcctggatttactcagtggctgtgatcatcaagggcatcgtgtatgagaaggaggcacggctgaaagagaccatgcggatcatgggcctggacaacagcatcctctggtttagctggttcattagtagcctcattcctcttcttgtgagcgctggcctgctagtggtcatcctgaagttaggaaacctgctgccctacagtgatcccagcgtggtgtttgtcttcctgtccgtgtttgctgtggtgacaatcctgcagtgcttcctgattagcacactcttctccagagccaacctggcagcagcctgtgggggcatcatctacttcacgctgtacctgccctacgtcctgtgtgtggcatggcaggactacgtgggcttcacactcaagatcttcgctagcctgctgtctcctgtggcttttgggtttggctgtgagtactttgccctttttgaggagcagggcattggagtgcagtgggacaacctgtttgagagtcctgtggaggaagatggcttcaatctcaccacttcggtctccatgatgctgtttgacaccttcctctatggggtgatgacctggtacattgaggctgtctttccaggccagtacggaattcccaggccctggtattttccttgcaccaagtcctactggtttggcgaggaaagtgatgagaagagccaccctggttccaaccagaagagaatatcagaaatctgcatggaggaggaacccacccacttgaagctgggcgtgtccattcagaacctggtaaaagtctaccgagatgggatgaaggtggctgtcgatggcctggcactgaatttttatgagggccagatcacctccttcctgggccacaatggagcggggaagacgaccaccatgtcaatcctgaccgggttgttccccccgacctcgggcaccgcctacatcctgggaaaagacattcgctctgagatgagcaccatccggcagaacctgggggtctgtccccagcataacgtgctgtttgacatgctgactgtcgaagaacacatctggttctatgcccgcttgaaagggctctctgagaagcacgtgaaggcggagatggagcagatggccctggatgttggtttgccatcaagcaagctgaaaagcaaaacaagccagctgtcaggtggaatgcagagaaagctatctgtggccttggcctttgtcgggggatctaaggttgtcattctggatgaacccacagctggtgtggacccttactcccgcaggggaatatgggagctgctgctgaaataccgacaaggccgcaccattattctctctacacaccacatggatgaagcggacgtcctgggggacaggattgccatcatctcccatgggaagctgtgctgtgtgggctcctccctgtttctgaagaaccagctgggaacaggctactacctgaccttggtcaagaaagatgtggaatcctccctcagttcctgcagaaacagtagtagcactgtgtcatacctgaaaaaggaggacagtgtttctcagagcagttctgatgctggcctgggcagcgaccatgagagtgacacgctgaccatcgatgtctctgctatctccaacctcatcaggaagcatgtgtctgaagcccggctggtggaagacatagggcatgagctgacctatgtgctgccatatgaagctgctaaggagggagcctttgtggaactctttcatgagattgatgaccggctctcagacctgggcatttctagttatggcatctcagagacgaccctggaagaaatattcctcaaggtggccgaagagagtggggtggatgctgagacctcagatggtaccttgccagcaagacgaaacaggcgggccttcggggacaagcagagctgtcttcgcccgttcactgaagatgatgctgctgatccaaatgattctgacatagacccagaatccagagagacagacttgctcagtgggatggatggcaaagggtcctaccaggtgaaaggctggaaacttacacagcaacagtttgtggcccttttgtggaagagactgctaattgccagacggagtcggaaaggattttttgctcagattgtcttgccagctgtgtttgtctgcattgcccttgtgttcagcctgatcgtgccaccctttggcaagtaccccagcctggaacttcagccctggatgtacaacgaacagtacacatttgtcagcaatgatgctcctgaggacacgggaaccctggaactcttaaacgccctcaccaaagaccctggcttcgggacccgctgtatggaaggaaacccaatcccagacacgccctgccaggcaggggaggaagagtggaccactgccccagttccccagaccatcatggacctcttccagaatgggaactggacaatgcagaacccttcacctgcatgccagtgtagcagcgacaaaatcaagaagatgctgcctgtgtgtcccccaggtgcaggggggctgcctcctccacaaagaaaacaaaacactgcagatatccttcaggacctgacaggaagaaacatttcggattatctggtgaagacgtatgtgcagatcatagccaaaagcttaaagaacaagatctgggtgaatgagtttaggtatggcggcttttccctgggtgtcagtaatactcaagcacttcctccgagtcaagaagttaatgatgccaccaaacaaatgaagaaacacctaaagctggccaaggacagttctgcagatcgatttctcaacagcttgggaagatttatgacaggactggacaccagaaataatgtcaaggtgtggttcaataacaagggctggcatgcaatcagctctttcctgaatgtcatcaacaatgccattctccgggccaacctgcaaaagggagagaaccctagccattatggaattactgctttcaatcatcccctgaatctcaccaagcagcagctctcagaggtggctccgatgaccacatcagtggatgtccttgtgtccatctgtgtcatctttgcaatgtccttcgtcccagccagctttgtcgtattcctgatccaggagcgggtcagcaaagcaaaacacctgcagttcatcagtggagtgaagcctgtcatctactggctctctaattttgtctgggatatgtgcaattacgttgtccctgccacactggtcattatcatcttcatctgcttccagcagaagtcctatgtgtcctccaccaatctgcctgtgctagcccttctacttttgctgtatgggtggtcaatcacacctctcatgtacccagcctcctttgtgttcaagatccccagcacagcctatgtggtgctcaccagcgtgaacctcttcattggcattaatggcagcgtggccacctttgtgctggagctgttcaccgacaataagctgaataatatcaatgatatcctgaagtccgtgttcttgatcttcccacatttttgcctgggacgagggctcatcgacatggtgaaaaaccaggcaatggctgatgccctggaaaggtttggggagaatcgctttgtgtcaccattatcttgggacttggtgggacgaaacctcttcgccatggccgtggaaggggtggtgttcttcctcattactgttctgatccagtacagattcttcatcaggcccagacctgtaaatgcaaagctatctcctctgaatgatgaagatgaagatgtgaggcgggaaagacagagaattcttgatggtggaggccagaatgacatcttagaaatcaaggagttgacgaagatatatagaaggaagcggaagcctgctgttgacaggatttgcgtgggcattcctcctggtgagtgctttgggctcctgggagttaatggggctggaaaatcatcaactttcaagatgttaacaggagataccactgttaccagaggagatgctttccttaacagaaatagtatcttatcaaacatccatgaagtacatcagaacatgggctactgccctcagtttgatgccatcacagagctgttgactgggagagaacacgtggagttctttgcccttttgagaggagtcccagagaaagaagttggcaaggttggtgagtgggcgattcggaaactgggcctcgtgaagtatggagaaaaatatgctggtaactatagtggaggcaacaaacgcaagctctctacagccatggctttgatcggcgggcctcctgtggtgtttctggatgaacccaccacaggcatggatcccaaagcccggcggttcttgtggaattgtgccctaagtgttgtcaaggaggggagatcagtagtgcttacatctcatagtatggaagaatgtgaagctctttgcactaggatggcaatcatggtcaatggaaggttcaggtgccttggcagtgtccagcatctaaaaaataggtttggagatggttatacaatagttgtacgaatagcagggtccaacccggacctgaagcctgtccaggatttctttggacttgcatttcctggaagtgttccaaaagagaaacaccggaacatgctacaataccagcttccatcttcattatcttctctggccaggatattcagcatcctctcccagagcaaaaagcgactccacatagaagactactctgtttctcagacaacacttgaccaagtatttgtgaactttgccaaggaccaaagtgatgatgaccacttaaaagacctctcattacacaaaaaccagacagtagtggacgttgcagttctcacatcttttctacaggatgagaaagtgaaagaaagctatgtatgaagaatcctgttcatacggggtggctgaaagtaaagaggnactagactttcctttgcaccatgtgaagtgttgtggagaaaagagccagaagttgatgtgggaagaagtaaactggatactgtactgatactattcaatgcaatgcaattcaatgcaatgaaaacaaaattccattacaggggcagtgcctttgtagcctatgtcttgtatggctctcaagtgaaagacttgaatttagttttttacctatacctatgtgaaactctattatggaacccaatggacatatgggtttgaactcacactttttttttttttttgttcctgtgtattctcattggggttgcaacaataattcatcaagtaatcatggccagcgattattgatcaaaatcaaaaggtaatgcacatcctcattcactaagccatgccatgcccaggagactggtttcccggtgacacatccattgctggcaatgagtgtgccagagttattagtgccaagtttttcagaaagtttgaagcaccatggtgtgtcatgctcacttttgtgaaagctgctctgctcagagtctatcaacattgaatatcagttgacagaatggtgccatgcgtggctaacatcctgctttgattccctctgataagctgttctggtggcagtaacatgcaacaaaaatgtgggtgtctctaggcacgggaaacttggttccattgttatattgtcctatgcttcgagccatgggtctacagggtcatccttatgagactcttaaatatacttagatcctggtaagaggcaaagaatcaacagccaaactgctggggctgcaagctgctgaagccagggcatgggattaaagagattgtgcgttcaaacctagggaagcctgtgcccatttgtcctgactgtctgctaacatggtacactgcatctcaagatgtttatctgacacaagtgtattatttctggctttttgaattaatctagaaaatgaaaagatggagttgtattttgacaaaaatgtttgtactttttaatgttatttggaattttaagttctatcagtgacttctgaatccttagaatggcctctttgtagaaccctgtggtatagaggagtatggccactgccccactatttttattttcttatgtaagtttgcatatcagtcatgactagtgcctagaaagcaatgtgatggtcaggatctcatgacattatatttgagtttctttcagatcatttaggatactcttaatctcacttcatcaatcaaatattttttgagtgtatgctgtagctgaaagagtatgtacgtacgtataagactagagagatattaagtctcagtacacttcctgtgccatgttattcagctcactggtttacaaatataggttgtcttgtggttgtaggagcccactgtaacaatactgggcagcctttttttttttttttaattgcaacaatgcaaaagccaagaaagtataagggtcacaagtctaaacaatgaattcttcaacagggaaaacagctagcttgaaaacttgctgaaaaacacaacttgtgtttatggcatttagtaccttcaaataattggctttgcagatattggataccccattaaatctgacagtctcaaatttttcatctcttcaatcactagtcaagaaaaatataaaaacaacaaatacttccatatggagcatttttcagagttttctaacccagtcttatttttctagtcagtaaacatttgtaaaaatactgtttcactaatacttactgttaactgtcttgagagaaaagaaaaatatgagagaactattgtttggggaagttcaagtgatctttcaatatcattactaacttcttccactttttccaaaatttgaatattaacgctaaaggtgtaagacttcagatttcaaattaatctttctatattttttaaatttacagaatattatataacccactgctgaaaaagaaaaaaatgattgttttagaagttaaagtcaatattgattttaaatataagtaatgaaggcatatttccaataactagtgatatggcatcgttgcattttacagtatcttcaaaaatacagaatttatagaataatttctcctcatttaatatttttcaaaatcaaagttatggtttcctcattttactaaaatcgtattctaattcttcattatagtaaatctatgagcaactccttacttcggttcctctgatttcaaggccatattttaaaaaatcaaaaggcactgtgaactattttgaagaaaacacaacattttaatacagattgaaaggacctcttctgaagctagaaacaatctatagttatacatcttcattaatactgtgttaccttttaaaatagtaattttttacattttcctgtgtaaacctaattgtggtagaaatttttaccaactctatactcaatcaagcaaaatttctgtatattccctgtggaatgtacctatgtgagtttcagaaattctcaaaatacgtgttcaaaaatttctgcttttgcatctttgggacacctcagaaaacttattaacaactgtgaatatgagaaatacagaagaaaataataagccctctatacataaatgcccagcacaattcattgttaaaaaacaaccaaacctcacactactgtatttcattatctgtactgaaagcaaatgctttgtgactattaaatgttgcacatcattcattcaaaaaaaaaaaaaaaaaaa

SEQ ID NO: 115 - DNA, 9870 bp, Homo sapiens; identical to SEQ ID NO: 93
  modified_base (7138): a, t, c or g

SEQ ID NO: 116 - DNA, 9870 bp, Homo sapiens
  modified_base (7138): a, t, c or g
gtaattgcgagcgagagtgagtggggccgggacccgcagagccgagccgacccttctctcccgggctgcggcagggcagggcggggagctccgcgcaccaacagagccggttctcagggcgctttgctccttgttttttccccggttctgttttctccccttctccggaaggcttgtcaaggggtaggagaaagagacgcaaacacaaaagtggaaaacagttaatgaccagccacggcgtccctgctgtgagctctggccgctgccttccagggctcccgagccacacgctgggggtgctggctgagggaacatggcttgttggcctcagctgaggttgctgctgtggaagaacctcactttcagaagaagacaaacatgtcagctgctgctggaagtggcctggcctctatttatcttcctgatcctgatctctgttcggctgagctacccaccctatgaacaacatgaatgccattttccaaataaagccatgccctctgcaggaacacttccttgggttcaggggattatctgtaatgccaacaacccctgtttccgttacccgactcctggggaggctcccggagttgttggaaactttaacaaatccattgtggctcgcctgttctcagatgctcggaggcttcttttatacagccagaaagacaccagcatgaaggacatgcgcaaagttctgagaacattacagcagatcaagaaatccagctcaaacttgaagcttcaagatttcctggtggacaatgaaaccttctctgggttcctgtatcacaacctctctctcccaaagtctactgtggacaagatgctgagggctgatgtcattctccacaaggtatttttgcaaggctaccagttacatttgacaagtctgtgcaatggatcaaaatcagaagagatgattcaacttggtgaccaagaagtttctgagctttgtggcctaccaagggagaaactggctgcagcagagcgagtacttcgttccaacatggacatcctgaagccaatcctgagaacactaaactctacatctcccttcccgagcaaggagctggccgaagccacaaaaacattgctgcatagtcttgggactctggcccaggagctgttcagcatgagaagctggagtgacatgcgacaggaggtgatgtttctgaccaatgtgaacagctccagctcctccacccaaatctaccaggctgtgtctcgtattgtctgcgggcatcccgagggaggggggctgaagatcaagtctctcaactggtatgaggacaacaactacaaagccctctttggaggcaatggcactgaggaagatgctgaaaccttctatgacaactctacaactccttactgcaatgatttgatgaagaatttggagtctagtcctctttcccgcattatctggaaagctctgaagccgctgctcgttgggaagatcctgtatacacctgacactccagccacaaggcaggtcatggctgaggtgaacaagaccttccaggaactggctgtgttccatgatctggaaggcatgtgggaggaactcagccccaagatctggaccttcatggagaacagccaagaaatggaccttgtccggatgctgttggacagcagggacaatgaccacttttgggaacagcagttggatggcttagattggacagcccaagacatcgtggcgtttttggccaagcacccagaggatgtccagtccagtaatggttctgtgtacacctggagagaagctttcaacgagactaaccaggcaatccggaccatatctcgcttcatggagtgtgtcaacctgaacaagctagaacccatagcaacagaagtctggctcatcaacaagtccatggagctgctggatgagaggaagttctgggctggtattgtgttcactggaattactccaggcagcattgagctgccccatcatgtcaagtacaagatccgaatggacattgacaatgtggagaggacaaataaaatcaaggatgggtactgggaccctggtcctcgagctgacccctttgaggacatgcggtacgtctgggggggcttcgcctacttgcaggatgtggtggagcaggcaatcatcagggtgctgacgggcaccgagaagaaaactggtgtctatatgcaacagatgccctatccctgttacgttgatgacatctttctgcgggtgatgagccggtcaatgcccctcttcatgacgctggcctggatttactcagtggctgtgatcatcaagggcatcgtgtatgagaaggaggcacggctgaaagagaccatgcggatcatgggcctggacaacagcatcctctggtttagctggttcattagtagcctcattcctcttcttgtgagcgctggcctgctagtggtcatcctgaagttaggaaacctgctgccctacagtgatcccagcgtggtgtttgtcttcctgtccgtgtttgctgtggtgacaatcctgcagtgcttcctgattagcacactcttctccagagccaacctggcagcagcctgtgggggcatcatctacttcacgctgtacctgccctacgtcctgtgtgtggcatggcaggactacgtgggcttcacactcaagatcttcgctagcctgctgtctcctgtggcttttgggtttggctgtgagtactttgccctttttgaggagcagggcattggagtgcagtgggacaacctgtttgagagtcctgtggaggaagatggcttcaatctcaccacttcggtctccatgatgctgtttgacaccttcctctatggggtgatgacctggtacattgaggctgtctttccaggccagtacggaattcccaggccctggtattttccttgcaccaagtcctactggtttggcgaggaaagtgatgagaagagccaccctggttccaaccagaagagaatatcagaaatctgcatggaggaggaacccacccacttgaagctgggcgtgtccattcagaacctggtaaaagtctaccgagatgggatgaaggtggctgtcgatggcctggcactgaatttttatgagggccagatcacctccttcctgggccacaatggagcggggaagacgaccaccatgtcaatcctgaccgggttgttccccccgacctcgggcaccgcctacatcctgggaaaagacattcgctctgagatgagcaccatccggcagaacctgggggtctgtccccagcataacgtgctgtttgacatgctgactgtcgaagaacacatctggttctatgcccgcttgaaagggctctctgagaagcacgtgaaggcggagatggagcagatggccctggatgttggtttgccatcaagcaagctgaaaagcaaaacaagccagctgtcaggtggaatgcagagaaagctatctgtggccttggcctttgtcgggggatctaaggttgtcattctggatgaacccacagctggtgtggacccttactcccgcaggggaatatgggagctgctgctgaaataccgacaaggccgcaccattattctctctacacaccacatggatgaagcggacgtcctgggggacaggattgccatcatctcccatgggaagctgtgctgtgtgggctcctccctgtttctgaagaaccagctgggaacaggctactacctgaccttggtcaagaaagatgtggaatcctccctcagttcctgcagaaacagtagtagcactgtgtcatacctgaaaaaggaggacagtgtttctcagagcagttctgatgctggcctgggcagcgaccatgagagtgacacgctgaccatcgatgtctctgctatctccaacctcatcaggaagcatgtgtctgaagcccggctggtggaagacatagggcatgagctgacctatgtgctgccatatgaagctgctaaggagggagcctttgtggaactctttcatgagattgatgaccggctctcagacctgggcatttctagttatggcatctcagagacgaccctggaagaaatattcctcaaggtggccgaagagagtggggtggatgctgagacctcagatggtaccttgccagcaagacgaaacaggcgggccttcggggacaagcagagctgtcttcgcccgttcactgaagatgatgctgctgatccaaatgattctgacatagacccagaatccagagagacagacttgctcagtgggatggatggcaaagggtcctaccaggtgaaaggctggaaacttacacagcaacagtttgtggcccttttgtggaagagactgctaattgccagacggagtcggaaaggattttttgctcagattgtcttgccagctgtgtttgtctgcattgcccttgtgttcagcctgatcgtgccaccctttggcaagtaccccagcctggaacttcagccctggatgtacaacgaacagtacacatttgtcagcaatgatgctcctgaggacacgggaaccctggaactcttaaacgccctcaccaaagaccctggcttcgggacccgctgtatggaaggaaacccaatcccagacacgccctgccaggcaggggaggaagagtggaccactgccccagttccccagaccatcatggacctcttccagaatgggaactggacaatgcagaacccttcacctgcatgccagtgtagcagcgacaaaatcaagaagatgctgcctgtgtgtcccccaggggcaggggggctgcctcctccacaaagaaaacaaaacactgcagatatccttcaggacctgacaggaagaaacatttcggattatctggtgaagacgtatgtgcagatcatagccaaaagcttaaagaacaagatctgggtgaatgagtttaggtatggcggcttttccctgggtgtcagtaatactcaagcacttcctccgagtcaagaagttaatgatgccaccaaacaaatgaagaaacacctaaagctggccaaggacagttctgcagatcgatttctcaacagcttgggaagatttatgacaggactggacaccagaaataatgtcaaggtgtggttcaataacaagggctggcatgcaatcagctctttcctgaatgtcatcaacaatgccattctccgggccaacctgcaaaagggagagaaccctagccattatggaattactgctttcaatcatcccctgaatctcaccaagcagcagctctcagaggtggctccgatgaccacatcagtggatgtccttgtgtccatctgtgtcatctttgcaatgtccttcgtcccagccagctttgtcatattcctgatccaggagcgggtcagcaaagcaaaacacctgcagttcatcagtggagtgaagcctgtcatctactggctctctaattttgtctgggatatgtgcaattacgttgtccctgccacactggtcattatcatcttcatctgcttccagcagaagtcctatgtgtcctccaccaatctgcctgtgctagcccttctacttttgctgtatgggtggtcaatcacacctctcatgtacccagcctcctttgtgttcaagatccccagcacagcctatgtggtgctcaccagcgtgaacctcttcattggcattaatggcagcgtggccacctttgtgctggagctgttcaccgacaataagctgaataatatcaatgatatcctgaagtccgtgttcttgatcttcccacatttttgcctgggacgagggctcatcgacatggtgaaaaaccaggcaatggctgatgccctggaaaggtttggggagaatcgctttgtgtcaccattatcttgggacttggtgggacgaaacctcttcgccatggccgtggaaggggtggtgttcttcctcattactgttctgatccagtacagattcttcatcaggcccagacctgtaaatgcaaagctatctcctctgaatgatgaagatgaagatgtgaggcgggaaagacagagaattcttgatggtggaggccagaatgacatcttagaaatcaaggagttgacgaagatatatagaaggaagcggaagcctgctgttgacaggatttgcgtgggcattcctcctggtgagtgctttgggctcctgggagttaatggggctggaaaatcatcaactttcaagatgttaacaggagataccactgttaccagaggagatgctttccttaacagaaatagtatcttatcaaacatccatgaagtacatcagaacatgggctactgccctcagtttgatgccatcacagagctgttgactgggagagaacacgtggagttctttgcccttttgagaggagtcccagagaaagaagttggcaaggttggtgagtgggcgattcggaaactgggcctcgtgaagtatggagaaaaatatgctggtaactatagtggaggcaacaaacgcaagctctctacagccatggctttgatcggcgggcctcctgtggtgtttctggatgaacccaccacaggcatggatcccaaagcccggcggttcttgtggaattgtgccctaagtgttgtcaaggaggggagatcagtagtgcttacatctcatagtatggaagaatgtgaagctctttgcactaggatggcaatcatggtcaatggaaggttcaggtgccttggcagtgtccagcatctaaaaaataggtttggagatggttatacaatagttgtacgaatagcagggtccaacccggacctgaagcctgtccaggatttctttggacttgcatttcctggaagtgttccaaaagagaaacaccggaacatgctacaataccagcttccatcttcattatcttctctggccaggatattcagcatcctctcccagagcaaaaagcgactccacatagaagactactctgtttctcagacaacacttgaccaagtatttgtgaactttgccaaggaccaaagtgatgatgaccacttaaaagacctctcattacacaaaaaccagacagtagtggacgttgcagttctcacatcttttctacaggatgagaaagtgaaagaaagctatgtatgaagaatcctgttcatacggggtggctgaaagtaaagaggnactagactttcctttgcaccatgtgaagtgttgtggagaaaagagccagaagttgatgtgggaagaagtaaactggatactgtactgatactattcaatgcaatgcaattcaatgcaatgaaaacaaaattccattacaggggcagtgcctttgtagcctatgtcttgtatggctctcaagtgaaagacttgaatttagttttttacctatacctatgtgaaactctattatggaacccaatggacatatgggtttgaactcacactttttttttttttttgttcctgtgtattctcattggggttgcaacaataattcatcaagtaatcatggccagcgattattgatcaaaatcaaaaggtaatgcacatcctcattcactaagccatgccatgcccaggagactggtttcccggtgacacatccattgctggcaatgagtgtgccagagttattagtgccaagtttttcagaaagtttgaagcaccatggtgtgtcatgctcacttttgtgaaagctgctctgctcagagtctatcaacattgaatatcagttgacagaatggtgccatgcgtggctaacatcctgctttgattccctctgataagctgttctggtggcagtaacatgcaacaaaaatgtgggtgtctctaggcacgggaaacttggttccattgttatattgtcctatgcttcgagccatgggtctacagggtcatccttatgagactcttaaatatacttagatcctggtaagaggcaaagaatcaacagccaaactgctggggctgcaagctgctgaagccagggcatgggattaaagagattgtgcgttcaaacctagggaagcctgtgcccatttgtcctgactgtctgctaacatggtacactgcatctcaagatgtttatctgacacaagtgtattatttctggctttttgaattaatctagaaaatgaaaagatggagttgtattttgacaaaaatgtttgtactttttaatgttatttggaattttaagttctatcagtgacttctgaatccttagaatggcctctttgtagaaccctgtggtatagaggagtatggccactgccccactatttttattttcttatgtaagtttgcatatcagtcatgactagtgcctagaaagcaatgtgatggtcaggatctcatgacattatatttgagtttctttcagatcatttaggatactcttaatctcacttcatcaatcaaatattttttgagtgtatgctgtagctgaaagagtatgtacgtacgtataagactagagagatattaagtctcagtacacttcctgtgccatgttattcagctcactggtttacaaatataggttgtcttgtggttgtaggagcccactgtaacaatactgggcagcctttttttttttttttaattgcaacaatgcaaaagccaagaaagtataagggtcacaagtctaaacaatgaattcttcaacagggaaaacagctagcttgaaaacttgctgaaaaacacaacttgtgtttatggcatttagtaccttcaaataattggctttgcagatattggataccccattaaatctgacagtctcaaatttttcatctcttcaatcactagtcaagaaaaatataaaaacaacaaatacttccatatggagcatttttcagagttttctaacccagtcttatttttctagtcagtaaacatttgtaaaaatactgtttcactaatacttactgttaactgtcttgagagaaaagaaaaatatgagagaactattgtttggggaagttcaagtgatctttcaatatcattactaacttcttccactttttccaaaatttgaatattaacgctaaaggtgtaagacttcagatttcaaattaatctttctatattttttaaatttacagaatattatataacccactgctgaaaaagaaaaaaatgattgttttagaagttaaagtcaatattgattttaaatataagtaatgaaggcatatttccaataactagtgatatggcatcgttgcattttacagtatcttcaaaaatacagaatttatagaataatttctcctcatttaatatttttcaaaatcaaagttatggtttcctcattttactaaaatcgtattctaattcttcattatagtaaatctatgagcaactccttacttcggttcctctgatttcaaggccatattttaaaaaatcaaaaggcactgtgaactattttgaagaaaacacaacattttaatacagattgaaaggacctcttctgaagctagaaacaatctatagttatacatcttcattaatactgtgttaccttttaaaatagtaattttttacattttcctgtgtaaacctaattgtggtagaaatttttaccaactctatactcaatcaagcaaaatttctgtatattccctgtggaatgtacctatgtgagtttcagaaattctcaaaatacgtgttcaaaaatttctgcttttgcatctttgggacacctcagaaaacttattaacaactgtgaatatgagaaatacagaagaaaataataagccctctatacataaatgcccagcacaattcattgttaaaaaacaaccaaacctcacactactgtatttcattatctgtactgaaagcaaatgctttgtgactattaaatgttgcacatcattcattcaaaaaaaaaaaaaaaaaaa

SEQ ID NO: 117 - DNA, 9870 bp, Homo sapiens
  modified_base (7138): a, t, c or g
gtaattgcgagcgagagtgagtggggccgggacccgcagagccgagccgacccttctctcccgggctgcggcagggcagggcggggagctccgcgcaccaacagagccggttctcagggcgctttgctccttgttttttccccggttctgttttctccccttctccggaaggcttgtcaaggggtaggagaaagagacgcaaacacaaaagtggaaaacagttaatgaccagccacggcgtccctgctgtgagctctggccgctgccttccagggctcccgagccacacgctgggggtgctggctgagggaacatggcttgttggcctcagctgaggttgctgctgtggaagaacctcactttcagaagaagacaaacatgtcagctgctgctggaagtggcctggcctctatttatcttcctgatcctgatctctgttcggctgagctacccaccctatgaacaacatgaatgccattttccaaataaagccatgccctctgcaggaacacttccttgggttcaggggattatctgtaatgccaacaacccctgtttccgttacccgactcctggggaggctcccggagttgttggaaactttaacaaatccattgtggctcgcctgttctcagatgctcggaggcttcttttatacagccagaaagacaccagcatgaaggacatgcgcaaagttctgagaacattacagcagatcaagaaatccagctcaaacttgaagcttcaagatttcctggtggacaatgaaaccttctctgggttcctgtatcacaacctctctctcccaaagtctactgtggacaagatgctgagggctgatgtcattctccacaaggtatttttgcaaggctaccagttacatttgacaagtctgtgcaatggatcaaaatcagaagagatgattcaacttggtgaccaagaagtttctgagctttgtggcctaccaagggagaaactggctgcagcagagcgagtacttcgttccaacatggacatcctgaagccaatcctgagaacactaaactctacatctcccttcccgagcaaggagctggccgaagccacaaaaacattgctgcatagtcttgggactctggcccaggagctgttcagcatgagaagctggagtgacatgcgacaggaggtgatgtttctgaccaatgtgaacagctccagctcctccacccaaatctaccaggctgtgtctcgtattgtctgcgggcatcccgagggaggggggctgaagatcaagtctctcaactggtatgaggacaacaactacaaagccctctttggaggcaatggcactgaggaagatgctgaaaccttctatgacaactctacaactccttactgcaatgatttgatgaagaatttggagtctagtcctctttcccgcattatctggaaagctctgaagccgctgctcgttgggaagatcctgtatacacctgacactccagccacaaggcaggtcatggctgaggtgaacaagaccttccaggaactggctgtgttccatgatctggaaggcatgtgggaggaactcagccccaagatctggaccttcatggagaacagccaagaaatggaccttgtccggatgctgttggacagcagggacaatgaccacttttgggaacagcagttggatggcttagattggacagcccaagacatcgtggcgtttttggccaagcacccagaggatgtccagtccagtaatggttctgtgtacacctggagagaagctttcaacgagactaaccaggcaatccggaccatatctcgcttcatggagtgtgtcaacctgaacaagctagaacccatagcaacagaagtctggctcatcaacaagtccatggagctgctggatgagaggaagttctgggctggtattgtgttcactggaattactccaggcagcattgagctgccccatcatgtcaagtacaagatccgaatggacattgacaatgtggagaggacaaataaaatcaaggatgggtactgggaccctggtcctcgagctgacccctttgaggacatgcggtacgtctgggggggcttcgcctacttgcaggatgtggtggagcaggcaatcatcagggtgctgacgggcaccgagaagaaaactggtgtctatatgcaacagatgccctatccctgttacgttgatgacatctttctgcgggtgatgagccggtcaatgcccctcttcatgacgctggcctggatttactcagtggctgtgatcatcaagggcatcgtgtatgagaaggaggcacggctgaaagagaccatgcggatcatgggcctggacaacagcatcctctggtttagctggttcattagtagcctcattcctcttcttgtgagcgctggcctgctagtggtcatcctgaagttaggaaacctgctgccctacagtgatcccagcgtggtgtttgtcttcctgtccgtgtttgctgtggtgacaatcctgcagtgcttcctgattagcacactcttctccagagccaacctggcagcagcctgtgggggcatcatctacttcacgctgtacctgccctacgtcctgtgtgtggcatggcaggactacgtgggcttcacactcaagatcttcgctagcctgctgtctcctgtggcttttgggtttggctgtgagtactttgccctttttgaggagcagggcattggagtgcagtgggacaacctgtttgagagtcctgtggaggaagatggcttcaatctcaccacttcggtctccatgatgctgtttgacaccttcctctatggggtgatgacctggtacattgaggctgtctttccaggccagtacggaattcccaggccctggtattttccttgcaccaagtcctactggtttggcgaggaaagtgatgagaagagccaccctggttccaaccagaagagaatatcagaaatctgcatggaggaggaacccacccacttgaagctgggcgtgtccattcagaacctggtaaaagtctaccgagatgggatgaaggtggctgtcgatggcctggcactgaatttttatgagggccagatcacctccttcctgggccacaatggagcggggaagacgaccaccatgtcaatcctgaccgggttgttccccccgacctcgggcaccgcctacatcctgggaaaagacattcgctctgagatgagcaccatccggcagaacctgggggtctgtccccagcataacgtgctgtttgacatgctgactgtcgaagaacacatctggttctatgcccgcttgaaagggctctctgagaagcacgtgaaggcggagatggagcagatggccctggatgttggtttgccatcaagcaagctgaaaagcaaaacaagccagctgtcaggtggaatgcagagaaagctatctgtggccttggcctttgtcgggggatctaaggttgtcattctggatgaacccacagctggtgtggacccttactcccgcaggggaatatgggagctgctgctgaaataccgacaaggccgcaccattattctctctacacaccacatggatgaagcggacgtcctgggggacaggattgccatcatctcccatgggaagctgtgctgtgtgggctcctccctgtttctgaagaaccagctgggaacaggctactacctgaccttggtcaagaaagatgtggaatcctccctcagttcctgcagaaacagtagtagcactgtgtcatacctgaaaaaggaggacagtgtttctcagagcagttctgatgctggcctgggcagcgaccatgagagtgacacgctgaccatcgatgtctctgctatctccaacctcatcaggaagcatgtgtctgaagcccggctggtggaagacatagggcatgagctgacctatgtgctgccatatgaagctgctaaggagggagcctttgtggaactctttcatgagattgatgaccggctctcagacctgggcatttctagttatggcatctcagagacgaccctggaagaaatattcctcaaggtggccgaagagagtggggtggatgctgagacctcagatggtaccttgccagcaagacgaaacaggcgggccttcggggacaagcagagctgtcttcgcccgttcactgaagatgatgctgctgatccaaatgattctgacatagacccagaatccagagagacagacttgctcagtgggatggatggcaaagggtcctaccaggtgaaaggctggaaacttacacagcaacagtttgtggcccttttgtggaagagactgctaattgccagacggagtcggaaaggattttttgctcagattgtcttgccagctgtgtttgtctgcattgcccttgtgttcagcctgatcgtgccaccctttggcaagtaccccagcctggaacttcagccctggatgtacaacgaacagtacacatttgtcagcaatgatgctcctgaggacacgggaaccctggaactcttaaacgccctcaccaaagaccctggcttcgggacccgctgtatggaaggaaacccaatcccagacacgccctgccaggcaggggaggaagagtggaccactgccccagttccccagaccatcatggacctcttccagaatgggaactggacaatgcagaacccttcacctgcatgccagtgtagcagcgacaaaatcaagaagatgctgcctgtgtgtcccccaggggcaggggggctgcctcctccacaaagaaaacaaaacactgcagatatccttcaggacctgacaggaagaaacatttcggattatctggtgaagacgtatgtgcagatcatagccaaaagcttaaagaacaagatctgggtgaatgagtttaggtatggcggcttttccctgggtgtcagtaatactcaagcacttcctccgagtcaagaagttaatgatgccaccaaacaaatgaagaaacacctaaagctggccaaggacagttctgcagatcgatttctcaacagcttgggaagatttatgacaggactggacaccagaaataatgtcaaggtgtggttcaataacaagggctggcatgcaatcagctctttcctgaatgtcatcaacaatgccattctccgggccaacctgcaaaagggagagaaccctagccattatggaattactgctttcaatcatcccctgaatctcaccaagcagcagctctcagaggtggctccgatgaccacatcagtggatgtccttgtgtccatctgtgtcatctttgcaatgtccttcgtcccagccagctttgtcgtattcctgatccaggagcgggtcagcaaagcaaaacacctgcagttcatcagtggagtgaagcctgtcatctactggctctctaattttgtctgggatatgtgcaattacgttgtccctgccacactggtcattatcatcttcatctgcttccagcagaagtcctatgtgtcctccaccaatctgcctgtgctagcccttctacttttgctgtatgggtggtcaatcacacctctcatgtacccagcctcctttgtgttcaagatccccagcacagcctacgtggtgctcaccagcgtgaacctcttcattggcattaatggcagcgtggccacctttgtgctggagctgttcaccgacaataagctgaataatatcaatgatatcctgaagtccgtgttcttgatcttcccacatttttgcctgggacgagggctcatcgacatggtgaaaaaccaggcaatggctgatgccctggaaaggtttggggagaatcgctttgtgtcaccattatcttgggacttggtgggacgaaacctcttcgccatggccgtggaaggggtggtgttcttcctcattactgttctgatccagtacagattcttcatcaggcccagacctgtaaatgcaaagctatctcctctgaatgatgaagatgaagatgtgaggcgggaaagacagagaattcttgatggtggaggccagaatgacatcttagaaatcaaggagttgacgaagatatatagaaggaagcggaagcctgctgttgacaggatttgcgtgggcattcctcctggtgagtgctttgggctcctgggagttaatggggctggaaaatcatcaactttcaagatgttaacaggagataccactgttaccagaggagatgctttccttaacagaaatagtatcttatcaaacatccatgaagtacatcagaacatgggctactgccctcagtttgatgccatcacagagctgttgactgggagagaacacgtggagttctttgcccttttgagaggagtcccagagaaagaagttggcaaggttggtgagtgggcgattcggaaactgggcctcgtgaagtatggagaaaaatatgctggtaactatagtggaggcaacaaacgcaagctctctacagccatggctttgatcggcgggcctcctgtggtgtttctggatgaacccaccacaggcatggatcccaaagcccggcggttcttgtggaattgtgccctaagtgttgtcaaggaggggagatcagtagtgcttacatctcatagtatggaagaatgtgaagctctttgcactaggatggcaatcatggtcaatggaaggttcaggtgccttggcagtgtccagcatctaaaaaataggtttggagatggttatacaatagttgtacgaatagcagggtccaacccggacctgaagcctgtccaggatttctttggacttgcatttcctggaagtgttccaaaagagaaacaccggaacatgctacaataccagcttccatcttcattatcttctctggccaggatattcagcatcctctcccagagcaaaaagcgactccacatagaagactactctgtttctcagacaacacttgaccaagtatttgtgaactttgccaaggaccaaagtgatgatgaccacttaaaagacctctcattacacaaaaaccagacagtagtggacgttgcagttctcacatcttttctacaggatgagaaagtgaaagaaagctatgtatgaagaatcctgttcatacggggtggctgaaagtaaagaggnactagactttcctttgcaccatgtgaagtgttgtggagaaaagagccagaagttgatgtgggaagaagtaaactggatactgtactgatactattcaatgcaatgcaattcaatgcaatgaaaacaaaattccattacaggggcagtgcctttgtagcctatgtcttgtatggctctcaagtgaaagacttgaatttagttttttacctatacctatgtgaaactctattatggaacccaatggacatatgggtttgaactcacactttttttttttttttgttcctgtgtattctcattggggttgcaacaataattcatcaagtaatcatggccagcgattattgatcaaaatcaaaaggtaatgcacatcctcattcactaagccatgccatgcccaggagactggtttcccggtgacacatccattgctggcaatgagtgtgccagagttattagtgccaagtttttcagaaagtttgaagcaccatggtgtgtcatgctcacttttgtgaaagctgctctgctcagagtctatcaacattgaatatcagttgacagaatggtgccatgcgtggctaacatcctgctttgattccctctgataagctgttctggtggcagtaacatgcaacaaaaatgtgggtgtctctaggcacgggaaacttggttccattgttatattgtcctatgcttcgagccatgggtctacagggtcatccttatgagactcttaaatatacttagatcctggtaagaggcaaagaatcaacagccaaactgctggggctgcaagctgctgaagccagggcatgggattaaagagattgtgcgttcaaacctagggaagcctgtgcccatttgtcctgactgtctgctaacatggtacactgcatctcaagatgtttatctgacacaagtgtattatttctggctttttgaattaatctagaaaatgaaaagatggagttgtattttgacaaaaatgtttgtactttttaatgttatttggaattttaagttctatcagtgacttctgaatccttagaatggcctctttgtagaaccctgtggtatagaggagtatggccactgccccactatttttattttcttatgtaagtttgcatatcagtcatgactagtgcctagaaagcaatgtgatggtcaggatctcatgacattatatttgagtttctttcagatcatttaggatactcttaatctcacttcatcaatcaaatattttttgagtgtatgctgtagctgaaagagtatgtacgtacgtataagactagagagatattaagtctcagtacacttcctgtgccatgttattcagctcactggtttacaaatataggttgtcttgtggttgtaggagcccactgtaacaatactgggcagcctttttttttttttttaattgcaacaatgcaaaagccaagaaagtataagggtcacaagtctaaacaatgaattcttcaacagggaaaacagctagcttgaaaacttgctgaaaaacacaacttgtgtttatggcatttagtaccttcaaataattggctttgcagatattggataccccattaaatctgacagtctcaaatttttcatctcttcaatcactagtcaagaaaaatataaaaacaacaaatacttccatatggagcatttttcagagttttctaacccagtcttatttttctagtcagtaaacatttgtaaaaatactgtttcactaatacttactgttaactgtcttgagagaaaagaaaaatatgagagaactattgtttggggaagttcaagtgatctttcaatatcattactaacttcttccactttttccaaaatttgaatattaacgctaaaggtgtaagacttcagatttcaaattaatctttctatattttttaaatttacagaatattatataacccactgctgaaaaagaaaaaaatgattgttttagaagttaaagtcaatattgattttaaatataagtaatgaaggcatatttccaataactagtgatatggcatcgttgcattttacagtatcttcaaaaatacagaatttatagaataatttctcctcatttaatatttttcaaaatcaaagttatggtttcctcattttactaaaatcgtattctaattcttcattatagtaaatctatgagcaactccttacttcggttcctctgatttcaaggccatattttaaaaaatcaaaaggcactgtgaactattttgaagaaaacacaacattttaatacagattgaaaggacctcttctgaagctagaaacaatctatagttatacatcttcattaatactgtgttaccttttaaaatagtaattttttacattttcctgtgtaaacctaattgtggtagaaatttttaccaactctatactcaatcaagcaaaatttctgtatattccctgtggaatgtacctatgtgagtttcagaaattctcaaaatacgtgttcaaaaatttctgcttttgcatctttgggacacctcagaaaacttattaacaactgtgaatatgagaaatacagaagaaaataataagccctctatacataaatgcccagcacaattcattgttaaaaaacaaccaaacctcacactactgtatttcattatctgtactgaaagcaaatgctttgtgactattaaatgttgcacatcattcattcaaaaaaaaaaaaaaaaaaa

SEQ ID NO: 118 - DNA, 9870 bp, Homo sapiens
  modified_base (7138): a, t, c or g
gtaattgcgagcgagagtgagtggggccgggacccgcagagccgagccgacccttctctcccgggctgcggcagggcagggcggggagctccgcgcaccaacagagccggttctcagggcgctttgctccttgttttttccccggttctgttttctccccttctccggaaggcttgtcaaggggtaggagaaagagacgcaaacacaaaagtggaaaacagttaatgaccagccacggcgtccctgctgtgagctctggccgctgccttccagggctcccgagccacacgctgggggtgctggctgagggaacatggcttgttggcctcagctgaggttgctgctgtggaagaacctcactttcagaagaagacaaacatgtcagctgctgctggaagtggcctggcctctatttatcttcctgatcctgatctctgttcggctgagctacccaccctatgaacaacatgaatgccattttccaaataaagccatgccctctgcaggaacacttccttgggttcaggggattatctgtaatgccaacaacccctgtttccgttacccgactcctggggaggctcccggagttgttggaaactttaacaaatccattgtggctcgcctgttctcagatgctcggaggcttcttttatacagccagaaagacaccagcatgaaggacatgcgcaaagttctgagaacattacagcagatcaagaaatccagctcaaacttgaagcttcaagatttcctggtggacaatgaaaccttctctgggttcctgtatcacaacctctctctcccaaagtctactgtggacaagatgctgagggctgatgtcattctccacaaggtatttttgcaaggctaccagttacatttgacaagtctgtgcaatggatcaaaatcagaagagatgattcaacttggtgaccaagaagtttctgagctttgtggcctaccaagggagaaactggctgcagcagagcgagtacttcgttccaacatggacatcctgaagccaatcctgagaacactaaactctacatctcccttcccgagcaaggagctggccgaagccacaaaaacattgctgcatagtcttgggactctggcccaggagctgttcagcatgagaagctggagtgacatgcgacaggaggtgatgtttctgaccaatgtgaacagctccagctcctccacccaaatctaccaggctgtgtctcgtattgtctgcgggcatcccgagggaggggggctgaagatcaagtctctcaactggtatgaggacaacaactacaaagccctctttggaggcaatggcactgaggaagatgctgaaaccttctatgacaactctacaactccttactgcaatgatttgatgaagaatttggagtctagtcctctttcccgcattatctggaaagctctgaagccgctgctcgttgggaagatcctgtatacacctgacactccagccacaaggcaggtcatggctgaggtgaacaagaccttccaggaactggctgtgttccatgatctggaaggcatgtgggaggaactcagccccaagatctggaccttcatggagaacagccaagaaatggaccttgtccggatgctgttggacagcagggacaatgaccacttttgggaacagcagttggatggcttagattggacagcccaagacatcgtggcgtttttggccaagcacccagaggatgtccagtccagtaatggttctgtgtacacctggagagaagctttcaacgagactaaccaggcaatccggaccatatctcgcttcatggagtgtgtcaacctgaacaagctagaacccatagcaacagaagtctggctcatcaacaagtccatggagctgctggatgagaggaagttctgggctggtattgtgttcactggaattactccaggcagcattgagctgccccatcatgtcaagtacaagatccgaatggacattgacaatgtggagaggacaaataaaatcaaggatgggtactgggaccctggtcctcgagctgacccctttgaggacatgcggtacgtctgggggggcttcgcctacttgcaggatgtggtggagcaggcaatcatcagggtgctgacgggcaccgagaagaaaactggtgtctatatgcaacagatgccctatccctgttacgttgatgacatctttctgcgggtgatgagccggtcaatgcccctcttcatgacgctggcctggatttactcagtggctgtgatcatcaagggcatcgtgtatgagaaggaggcacggctgaaagagaccatgcggatcatgggcctggacaacagcatcctctggtttagctggttcattagtagcctcattcctcttcttgtgagcgctggcctgctagtggtcatcctgaagttaggaaacctgctgccctacagtgatcccagcgtggtgtttgtcttcctgtccgtgtttgctgtggtgacaatcctgcagtgcttcctgattagcacactcttctccagagccaacctggcagcagcctgtgggggcatcatctacttcacgctgtacctgccctacgtcctgtgtgtggcatggcaggactacgtgggcttcacactcaagatcttcgctagcctgctgtctcctgtggcttttgggtttggctgtgagtactttgccctttttgaggagcagggcattggagtgcagtgggacaacctgtttgagagtcctgtggaggaagatggcttcaatctcaccacttcggtctccatgatgctgtttgacaccttcctctatggggtgatgacctggtacattgaggctgtctttccaggccagtacggaattcccaggccctggtattttccttgcaccaagtcctactggtttggcgaggaaagtgatgagaagagccaccctggttccaaccagaagagaatatcagaaatctgcatggaggaggaacccacccacttgaagctgggcgtgtccattcagaacctggtaaaagtctaccgagatgggatgaaggtggctgtcgatggcctggcactgaatttttatgagggccagatcacctccttcctgggccacaatggagcggggaagacgaccaccatgtcaatcctgaccgggttgttccccccgacctcgggcaccgcctacatcctgggaaaagacattcgctctgagatgagcaccatccggcagaacctgggggtctgtccccagcataacgtgctgtttgacatgctgactgtcgaagaacacatctggttctatgcccgcttgaaagggctctctgagaagcacgtgaaggcggagatggagcagatggccctggatgttggtttgccatcaagcaagctgaaaagcaaaacaagccagctgtcaggtggaatgcagagaaagctatctgtggccttggcctttgtcgggggatctaaggttgtcattctggatgaacccacagctggtgtggacccttactcccgcaggggaatatgggagctgctgctgaaataccgacaaggccgcaccattattctctctacacaccacatggatgaagcggacgtcctgggggacaggattgccatcatctcccatgggaagctgtgctgtgtgggctcctccctgtttctgaagaaccagctgggaacaggctactacctgaccttggtcaagaaagatgtggaatcctccctcagttcctgcagaaacagtagtagcactgtgtcatacctgaaaaaggaggacagtgtttctcagagcagttctgatgctggcctgggcagcgaccatgagagtgacacgctgaccatcgatgtctctgctatctccaacctcatcaggaagcatgtgtctgaagcccggctggtggaagacatagggcatgagctgacctatgtgctgccatatgaagctgctaaggagggagcctttgtggaactctttcatgagattgatgaccggctctcagacctgggcatttctagttatggcatctcagagacgaccctggaagaaatattcctcaaggtggccgaagagagtggggtggatgctgagacctcagatggtaccttgccagcaagacgaaacaggcgggccttcggggacaagcagagctgtcttcgcccgttcactgaagatgatgctgctgatccaaatgattctgacatagacccagaatccagagagacagacttgctcagtgggatggatggcaaagggtcctaccaggtgaaaggctggaaacttacacagcaacagtttgtggcccttttgtggaagagactgctaattgccagacggagtcggaaaggattttttgctcagattgtcttgccagctgtgtttgtctgcattgcccttgtgttcagcctgatcgtgccaccctttggcaagtaccccagcctggaacttcagccctggatgtacaacgaacagtacacatttgtcagcaatgatgctcctgaggacacgggaaccctggaactcttaaacgccctcaccaaagaccctggcttcgggacccgctgtatggaaggaaacccaatcccagacacgccctgccaggcaggggaggaagagtggaccactgccccagttccccagaccatcatggacctcttccagaatgggaactggacaatgcagaacccttcacctgcatgccagtgtagcagcgacaaaatcaagaagatgctgcctgtgtgtcccccaggggcaggggggctgcctcctccacaaagaaaacaaaacactgcagatatccttcaggacctgacaggaagaaacatttcggattatctggtgaagacgtatgtgcagatcatagccaaaagcttaaagaacaagatctgggtgaatgagtttaggtatggcggcttttccctgggtgtcagtaatactcaagcacttcctccgagtcaagaagttaatgatgccaccaaacaaatgaagaaacacctaaagctggccaaggacagttctgcagatcgatttctcaacagcttgggaagatttatgacaggactggacaccagaaataatgtcaaggtgtggttcaataacaagggctggcatgcaatcagctctttcctgaatgtcatcaacaatgccattctccgggccaacctgcaaaagggagagaaccctagccattatggaattactgctttcaatcatcccctgaatctcaccaagcagcagctctcagaggtggctccgatgaccacatcagtggatgtccttgtgtccatctgtgtcatctttgcaatgtccttcgtcccagccagctttgtcgtattcctgatccaggagcgggtcagcaaagcaaaacacctgcagttcatcagtggagtgaagcctgtcatctactggctctctaattttgtctgggatatgtgcaattacgttgtccctgccacactggtcattatcatcttcatctgcttccagcagaagtcctatgtgtcctccaccaatctgcctgtgctagcccttctacttttgctgtatgggtggtcaatcacacctctcatgtacccagcctcctttgtgttcaagatccccagcacagcctatgtggtgctcaccagcgtgaacctcttcattggcattaatggcagcgtggccacctttgtgctggagctgttcaccgacaataagctgaataatatcaatgatatcctgaagtccgtgttcttgatcttcccacatttttgcctgggacgagggctcatcgacatggtgaaaaaccaggcaatggctgatgccctggaaaggtttggggagaatcgctttgtgtcaccattatcttgggacttggtgggacgaaacctcttcgccatggccgtggaaggggtggtgttcttcctcattactgttctgatccagtacagattcttcatcaggcccagacctgtaaatgcaaagctatctcctctgaatgatgaagatgaagatgtgaggcgggaaagacagagaattcttgatggtggaggccagaatgacatcttagaaatcaaggagttgacgaagatatatagaaggaagcggaagcctgctgttgacaggatttgcgtgggcattcctcctggtgagtgctttgggctcctgggagttaatggggctggaaaatcatcaactttcaagatgttaacaggagataccactgttaccagaggagatgctttccttaacagaaatagtatcttatcaaacatccatgaagtacatcagaacatgggctactgccctcagtttgatgccatcacagagctgttgactgggagagaacacgtggagttctttgcccttttgagaggagtcccagagaaagaagttggcaaggttggtgagtgggcgattcggaaactgggcctcgtgaagtatggagaaaaatatgctggtaactatagtggaggcaacaaacgcaagctctctacagccatggctttgatcggtgggcctcctgtggtgtttctggatgaacccaccacaggcatggatcccaaagcccggcggttcttgtggaattgtgccctaagtgttgtcaaggaggggagatcagtagtgcttacatctcatagtatggaagaatgtgaagctctttgcactaggatggcaatcatggtcaatggaaggttcaggtgccttggcagtgtccagcatctaaaaaataggtttggagatggttatacaatagttgtacgaatagcagggtccaacccggacctgaagcctgtccaggatttctttggacttgcatttcctggaagtgttccaaaagagaaacaccggaacatgctacaataccagcttccatcttcattatcttctctggccaggatattcagcatcctctcccagagcaaaaagcgactccacatagaagactactctgtttctcagacaacacttgaccaagtatttgtgaactttgccaaggaccaaagtgatgatgaccacttaaaagacctctcattacacaaaaaccagacagtagtggacgttgcagttctcacatcttttctacaggatgagaaagtgaaagaaagctatgtatgaagaatcctgttcatacggggtggctgaaagtaaagaggnactagactttcctttgcaccatgtgaagtgttgtggagaaaagagccagaagttgatgtgggaagaagtaaactggatactgtactgatactattcaatgcaatgcaattcaatgcaatgaaaacaaaattccattacaggggcagtgcctttgtagcctatgtcttgtatggctctcaagtgaaagacttgaatttagttttttacctatacctatgtgaaactctattatggaacccaatggacatatgggtttgaactcacactttttttttttttttgttcctgtgtattctcattggggttgcaacaataattcatcaagtaatcatggccagcgattattgatcaaaatcaaaaggtaatgcacatcctcattcactaagccatgccatgcccaggagactggtttcccggtgacacatccattgctggcaatgagtgtgccagagttattagtgccaagtttttcagaaagtttgaagcaccatggtgtgtcatgctcacttttgtgaaagctgctctgctcagagtctatcaacattgaatatcagttgacagaatggtgccatgcgtggctaacatcctgctttgattccctctgataagctgttctggtggcagtaacatgcaacaaaaatgtgggtgtctctaggcacgggaaacttggttccattgttatattgtcctatgcttcgagccatgggtctacagggtcatccttatgagactcttaaatatacttagatcctggtaagaggcaaagaatcaacagccaaactgctggggctgcaagctgctgaagccagggcatgggattaaagagattgtgcgttcaaacctagggaagcctgtgcccatttgtcctgactgtctgctaacatggtacactgcatctcaagatgtttatctgacacaagtgtattatttctggctttttgaattaatctagaaaatgaaaagatggagttgtattttgacaaaaatgtttgtactttttaatgttatttggaattttaagttctatcagtgacttctgaatccttagaatggcctctttgtagaaccctgtggtatagaggagtatggccactgccccactatttttattttcttatgtaagtttgcatatcagtcatgactagtgcctagaaagcaatgtgatggtcaggatctcatgacattatatttgagtttctttcagatcatttaggatactcttaatctcacttcatcaatcaaatattttttgagtgtatgctgtagctgaaagagtatgtacgtacgtataagactagagagatattaagtctcagtacacttcctgtgccatgttattcagctcactggtttacaaatataggttgtcttgtggttgtaggagcccactgtaacaatactgggcagcctttttttttttttttaattgcaacaatgcaaaagccaagaaagtataagggtcacaagtctaaacaatgaattcttcaacagggaaaacagctagcttgaaaacttgctgaaaaacacaacttgtgtttatggcatttagtaccttcaaataattggctttgcagatattggataccccattaaatctgacagtctcaaatttttcatctcttcaatcactagtcaagaaaaatataaaaacaacaaatacttccatatggagcatttttcagagttttctaacccagtcttatttttctagtcagtaaacatttgtaaaaatactgtttcactaatacttactgttaactgtcttgagagaaaagaaaaatatgagagaactattgtttggggaagttcaagtgatctttcaatatcattactaacttcttccactttttccaaaatttgaatattaacgctaaaggtgtaagacttcagatttcaaattaatctttctatattttttaaatttacagaatattatataacccactgctgaaaaagaaaaaaatgattgttttagaagttaaagtcaatattgattttaaatataagtaatgaaggcatatttccaataactagtgatatggcatcgttgcattttacagtatcttcaaaaatacagaatttatagaataatttctcctcatttaatatttttcaaaatcaaagttatggtttcctcattttactaaaatcgtattctaattcttcattatagtaaatctatgagcaactccttacttcggttcctctgatttcaaggccatattttaaaaaatcaaaaggcactgtgaactattttgaagaaaacacaacattttaatacagattgaaaggacctcttctgaagctagaaacaatctatagttatacatcttcattaatactgtgttaccttttaaaatagtaattttttacattttcctgtgtaaacctaattgtggtagaaatttttaccaactctatactcaatcaagcaaaatttctgtatattccctgtggaatgtacctatgtgagtttcagaaattctcaaaatacgtgttcaaaaatttctgcttttgcatctttgggacacctcagaaaacttattaacaactgtgaatatgagaaatacagaagaaaataataagccctctatacataaatgcccagcacaattcattgttaaaaaacaaccaaacctcacactactgtatttcattatctgtactgaaagcaaatgctttgtgactattaaatgttgcacatcattcattcaaaaaaaaaaaaaaaaaaa

SEQ ID NO: 119 - DNA, 9870 bp, Homo sapiens
  modified_base (7138): a, t, c or g
gtaattgcgagcgagagtgagtggggccgggacccgcagagccgagccgacccttctctcccgggctgcggcagggcagggcggggagctccgcgcaccaacagagccggttctcagggcgctttgctccttgttttttccccggttctgttttctccccttctccggaaggcttgtcaaggggtaggagaaagagacgcaaacacaaaagtggaaaacagttaatgaccagccacggcgtccctgctgtgagctctggccgctgccttccagggctcccgagccacacgctgggggtgctggctgagggaacatggcttgttggcctcagctgaggttgctgctgtggaagaacctcactttcagaagaagacaaacatgtcagctgctgctggaagtggcctggcctctatttatcttcctgatcctgatctctgttcggctgagctacccaccctatgaacaacatgaatgccattttccaaataaagccatgccctctgcaggaacacttccttgggttcaggggattatctgtaatgccaacaacccctgtttccgttacccgactcctggggaggctcccggagttgttggaaactttaacaaatccattgtggctcgcctgttctcagatgctcggaggcttcttttatacagccagaaagacaccagcatgaaggacatgcgcaaagttctgagaacattacagcagatcaagaaatccagctcaaacttgaagcttcaagatttcctggtggacaatgaaaccttctctgggttcctgtatcacaacctctctctcccaaagtctactgtggacaagatgctgagggctgatgtcattctccacaaggtatttttgcaaggctaccagttacatttgacaagtctgtgcaatggatcaaaatcagaagagatgattcaacttggtgaccaagaagtttctgagctttgtggcctaccaagggagaaactggctgcagcagagcgagtacttcgttccaacatggacatcctgaagccaatcctgagaacactaaactctacatctcccttcccgagcaaggagctggccgaagccacaaaaacattgctgcatagtcttgggactctggcccaggagctgttcagcatgagaagctggagtgacatgcgacaggaggtgatgtttctgaccaatgtgaacagctccagctcctccacccaaatctaccaggctgtgtctcgtattgtctgcgggcatcccgagggaggggggctgaagatcaagtctctcaactggtatgaggacaacaactacaaagccctctttggaggcaatggcactgaggaagatgctgaaaccttctatgacaactctacaactccttactgcaatgatttgatgaagaatttggagtctagtcctctttcccgcattatctggaaagctctgaagccgctgctcgttgggaagatcctgtatacacctgacactccagccacaaggcaggtcatggctgaggtgaacaagaccttccaggaactggctgtgttccatgatctggaaggcatgtgggaggaactcagccccaagatctggaccttcatggagaacagccaagaaatggaccttgtccggatgctgttggacagcagggacaatgaccacttttgggaacagcagttggatggcttagattggacagcccaagacatcgtggcgtttttggccaagcacccagaggatgtccagtccagtaatggttctgtgtacacctggagagaagctttcaacgagactaaccaggcaatccggaccatatctcgcttcatggagtgtgtcaacctgaacaagctagaacccatagcaacagaagtctggctcatcaacaagtccatggagctgctggatgagaggaagttctgggctggtattgtgttcactggaattactccaggcagcattgagctgccccatcatgtcaagtacaagatccgaatggacattgacaatgtggagaggacaaataaaatcaaggatgggtactgggaccctggtcctcgagctgacccctttgaggacatgcggtacgtctgggggggcttcgcctacttgcaggatgtggtggagcaggcaatcatcagggtgctgacgggcaccgagaagaaaactggtgtctatatgcaacagatgccctatccctgttacgttgatgacatctttctgcgggtgatgagccggtcaatgcccctcttcatgacgctggcctggatttactcagtggctgtgatcatcaagggcatcgtgtatgagaaggaggcacggctgaaagagaccatgcggatcatgggcctggacaacagcatcctctggtttagctggttcattagtagcctcattcctcttcttgtgagcgctggcctgctagtggtcatcctgaagttaggaaacctgctgccctacagtgatcccagcgtggtgtttgtcttcctgtccgtgtttgctgtggtgacaatcctgcagtgcttcctgattagcacactcttctccagagccaacctggcagcagcctgtgggggcatcatctacttcacgctgtacctgccctacgtcctgtgtgtggcatggcaggactacgtgggcttcacactcaagatcttcgctagcctgctgtctcctgtggcttttgggtttggctgtgagtactttgccctttttgaggagcagggcattggagtgcagtgggacaacctgtttgagagtcctgtggaggaagatggcttcaatctcaccacttcggtctccatgatgctgtttgacaccttcctctatggggtgatgacctggtacattgaggctgtctttccaggccagtacggaattcccaggccctggtattttccttgcaccaagtcctactggtttggcgaggaaagtgatgagaagagccaccctggttccaaccagaagagaatatcagaaatctgcatggaggaggaacccacccacttgaagctgggcgtgtccattcagaacctggtaaaagtctaccgagatgggatgaaggtggctgtcgatggcctggcactgaatttttatgagggccagatcacctccttcctgggccacaatggagcggggaagacgaccaccatgtcaatcctgaccgggttgttccccccgacctcgggcaccgcctacatcctgggaaaagacattcgctctgagatgagcaccatccggcagaacctgggggtctgtccccagcataacgtgctgtttgacatgctgactgtcgaagaacacatctggttctatgcccgcttgaaagggctctctgagaagcacgtgaaggcggagatggagcagatggccctggatgttggtttgccatcaagcaagctgaaaagcaaaacaagccagctgtcaggtggaatgcagagaaagctatctgtggccttggcctttgtcgggggatctaaggttgtcattctggatgaacccacagctggtgtggacccttactcccgcaggggaatatgggagctgctgctgaaataccgacaaggccgcaccattattctctctacacaccacatggatgaagcggacgtcctgggggacaggattgccatcatctcccatgggaagctgtgctgtgtgggctcctccctgtttctgaagaaccagctgggaacaggctactacctgaccttggtcaagaaagatgtggaatcctccctcagttcctgcagaaacagtagtagcactgtgtcatacctgaaaaaggaggacagtgtttctcagagcagttctgatgctggcctgggcagcgaccatgagagtgacacgctgaccatcgatgtctctgctatctccaacctcatcaggaagcatgtgtctgaagcccggctggtggaagacatagggcatgagctgacctatgtgctgccatatgaagctgctaaggagggagcctttgtggaactctttcatgagattgatgaccggctctcagacctgggcatttctagttatggcatctcagagacgaccctggaagaaatattcctcaaggtggccgaagagagtggggtggatgctgagacctcagatggtaccttgccagcaagacgaaacaggcgggccttcggggacaagcagagctgtcttcgcccgttcactgaagatgatgctgctgatccaaatgattctgacatagacccagaatccagagagacagacttgctcagtgggatggatggcaaagggtcctaccaggtgaaaggctggaaacttacacagcaacagtttgtggcccttttgtggaagagactgctaattgccagacggagtcggaaaggattttttgctcagattgtcttgccagctgtgtttgtctgcattgcccttgtgttcagcctgatcgtgccaccctttggcaagtaccccagcctggaacttcagccctggatgtacaacgaacagtacacatttgtcagcaatgatgctcctgaggacacgggaaccctggaactcttaaacgccctcaccaaagaccctggcttcgggacccgctgtatggaaggaaacccaatcccagacacgccctgccaggcaggggaggaagagtggaccactgccccagttccccagaccatcatggacctcttccagaatgggaactggacaatgcagaacccttcacctgcatgccagtgtagcagcgacaaaatcaagaagatgctgcctgtgtgtcccccaggggcaggggggctgcctcctccacaaagaaaacaaaacactgcagatatccttcaggacctgacaggaagaaacatttcggattatctggtgaagacgtatgtgcagatcatagccaaaagcttaaagaacaagatctgggtgaatgagtttaggtatggcggcttttccctgggtgtcagtaatactcaagcacttcctccgagtcaagaagttaatgatgccaccaaacaaatgaagaaacacctaaagctggccaaggacagttctgcagatcgatttctcaacagcttgggaagatttatgacaggactggacaccagaaataatgtcaaggtgtggttcaataacaagggctggcatgcaatcagctctttcctgaatgtcatcaacaatgccattctccgggccaacctgcaaaagggagagaaccctagccattatggaattactgctttcaatcatcccctgaatctcaccaagcagcagctctcagaggtggctccgatgaccacatcagtggatgtccttgtgtccatctgtgtcatctttgcaatgtccttcgtcccagccagctttgtcgtattcctgatccaggagcgggtcagcaaagcaaaacacctgcagttcatcagtggagtgaagcctgtcatctactggctctctaattttgtctgggatatgtgcaattacgttgtccctgccacactggtcattatcatcttcatctgcttccagcagaagtcctatgtgtcctccaccaatctgcctgtgctagcccttctacttttgctgtatgggtggtcaatcacacctctcatgtacccagcctcctttgtgttcaagatccccagcacagcctatgtggtgctcaccagcgtgaacctcttcattggcattaatggcagcgtggccacctttgtgctggagctgttcaccgacaataagctgaataatatcaatgatatcctgaagtccgtgttcttgatcttcccacatttttgcctgggacgagggctcatcgacatggtgaaaaaccaggcaatggctgatgccctggaaaggtttggggagaatcgctttgtgtcaccattatcttgggacttggtgggacgaaacctcttcgccatggccgtggaaggggtggtgttcttcctcattactgttctgatccagtacagattcttcatcaggcccagacctgtaaatgcaaagctatctcctctgaatgatgaagatgaagatgtgaggcgggaaagacagagaattcttgatggtggaggccagaatgacatcttagaaatcaaggagttgacgaagatatatagaaggaagcggaagcctgctgttgacaggatttgcgtgggcattcctcctggtgagtgctttgggctcctgggagttaatggggctggaaaatcatcaactttcaagatgttaacaggagataccactgttaccagaggagatgctttccttaacagaaatagtatcttatcaaacatccatgaagtacatcagaacatgggctactgccctcagtttgatgccatcacagagctgttgactgggagagaacacgtggagttctttgcccttttgagaggagtcccagagaaagaagttggcaaggttggtgagtgggcgattcggaaactgggcctcgtgaagtatggagaaaaatatgctggtaactatagtggaggcaacaaacgcaagctctctacagccatggctttgatcggcgggcctcctgtggtgtttctggatgaacccaccacaggcatggatcccaaagcccggcggttcttgtggaattgtgccctaagtgttgtcaaggaggggagatcagtagtgcttacatctcatagtatggaagaatgtgaagctctttgcactaggatggcaatcatggtcaatggaaggttcaggtgccttggcagtgtccagcatctaaaaaataggtttggagatggttatacaatagttgtacgaatagcagggtccaacccggacctgaagcctgtccaggatttctttggacttgcatttcctggaagtgttccaaaagagaaacaccggaacatgctacaataccagcttccatcttcattatcttctctggccaggatattcagcatcctctcccagagcaaaaagcgactccacatagaagactactctgtttctcagacaacacttgaccaagtatttgtgaactttgccaaggaccaaagtgatgatgaccacttaaaagacctctcattacacaaaaaccagacagtagtggacgttgcagttctcacatcttttctacaggatgagaaagtgaaagaaagctatgtatgaagaatcctgttcatacggggtggctgaaagtaaagaggnactagactttcctttgcaccatgtgaagtgttgtggagaaaagagccagaagttgatgtgggaagaagtaaactggatactgtactgatactattcaatgcaatgcaattcaatgcaatgaaaacaaaattccattacaggggcagtgcctttgtagcctatgtcttgtatggctctcaagtgaaagacttgaattcagttttttacctatacctatgtgaaactctattatggaacccaatggacatatgggtttgaactcacactttttttttttttttgttcctgtgtattctcattggggttgcaacaataattcatcaagtaatcatggccagcgattattgatcaaaatcaaaaggtaatgcacatcctcattcactaagccatgccatgcccaggagactggtttcccggtgacacatccattgctggcaatgagtgtgccagagttattagtgccaagtttttcagaaagtttgaagcaccatggtgtgtcatgctcacttttgtgaaagctgctctgctcagagtctatcaacattgaatatcagttgacagaatggtgccatgcgtggctaacatcctgctttgattccctctgataagctgttctggtggcagtaacatgcaacaaaaatgtgggtgtctctaggcacgggaaacttggttccattgttatattgtcctatgcttcgagccatgggtctacagggtcatccttatgagactcttaaatatacttagatcctggtaagaggcaaagaatcaacagccaaactgctggggctgcaagctgctgaagccagggcatgggattaaagagattgtgcgttcaaacctagggaagcctgtgcccatttgtcctgactgtctgctaacatggtacactgcatctcaagatgtttatctgacacaagtgtattatttctggctttttgaattaatctagaaaatgaaaagatggagttgtattttgacaaaaatgtttgtactttttaatgttatttggaattttaagttctatcagtgacttctgaatccttagaatggcctctttgtagaaccctgtggtatagaggagtatggccactgccccactatttttattttcttatgtaagtttgcatatcagtcatgactagtgcctagaaagcaatgtgatggtcaggatctcatgacattatatttgagtttctttcagatcatttaggatactcttaatctcacttcatcaatcaaatattttttgagtgtatgctgtagctgaaagagtatgtacgtacgtataagactagagagatattaagtctcagtacacttcctgtgccatgttattcagctcactggtttacaaatataggttgtcttgtggttgtaggagcccactgtaacaatactgggcagcctttttttttttttttaattgcaacaatgcaaaagccaagaaagtataagggtcacaagtctaaacaatgaattcttcaacagggaaaacagctagcttgaaaacttgctgaaaaacacaacttgtgtttatggcatttagtaccttcaaataattggctttgcagatattggataccccattaaatctgacagtctcaaatttttcatctcttcaatcactagtcaagaaaaatataaaaacaacaaatacttccatatggagcatttttcagagttttctaacccagtcttatttttctagtcagtaaacatttgtaaaaatactgtttcactaatacttactgttaactgtcttgagagaaaagaaaaatatgagagaactattgtttggggaagttcaagtgatctttcaatatcattactaacttcttccactttttccaaaatttgaatattaacgctaaaggtgtaagacttcagatttcaaattaatctttctatattttttaaatttacagaatattatataacccactgctgaaaaagaaaaaaatgattgttttagaagttaaagtcaatattgattttaaatataagtaatgaaggcatatttccaataactagtgatatggcatcgttgcattttacagtatcttcaaaaatacagaatttatagaataatttctcctcatttaatatttttcaaaatcaaagttatggtttcctcattttactaaaatcgtattctaattcttcattatagtaaatctatgagcaactccttacttcggttcctctgatttcaaggccatattttaaaaaatcaaaaggcactgtgaactattttgaagaaaacacaacattttaatacagattgaaaggacctcttctgaagctagaaacaatctatagttatacatcttcattaatactgtgttaccttttaaaatagtaattttttacattttcctgtgtaaacctaattgtggtagaaatttttaccaactctatactcaatcaagcaaaatttctgtatattccctgtggaatgtacctatgtgagtttcagaaattctcaaaatacgtgttcaaaaatttctgcttttgcatctttgggacacctcagaaaacttattaacaactgtgaatatgagaaatacagaagaaaataataagccctctatacataaatgcccagcacaattcattgttaaaaaacaaccaaacctcacactactgtatttcattatctgtactgaaagcaaatgctttgtgactattaaatgttgcacatcattcattcaaaaaaaaaaaaaaaaaaa

SEQ ID NO: 120 - DNA, 9870 bp, Homo sapiens
  modified_base (7138): a, t, c or g
gtaattgcgagcgagagtgagtggggccgggacccgcagagccgagccgacccttctctcccgggctgcggcagggcagggcggggagctccgcgcaccaacagagccggttctcagggcgctttgctccttgttttttccccggttctgttttctccccttctccggaaggcttgtcaaggggtaggagaaagagacgcaaacacaaaagtggaaaacagttaatgaccagccacggcgtccctgctgtgagctctggccgctgccttccagggctcccgagccacacgctgggggtgctggctgagggaacatggcttgttggcctcagctgaggttgctgctgtggaagaacctcactttcagaagaagacaaacatgtcagctgctgctggaagtggcctggcctctatttatcttcctgatcctgatctctgttcggctgagctacccaccctatgaacaacatgaatgccattttccaaataaagccatgccctctgcaggaacacttccttgggttcaggggattatctgtaatgccaacaacccctgtttccgttacccgactcctggggaggctcccggagttgttggaaactttaacaaatccattgtggctcgcctgttctcagatgctcggaggcttcttttatacagccagaaagacaccagcatgaaggacatgcgcaaagttctgagaacattacagcagatcaagaaatccagctcaaacttgaagcttcaagatttcctggtggacaatgaaaccttctctgggttcctgtatcacaacctctctctcccaaagtctactgtggacaagatgctgagggctgatgtcattctccacaaggtatttttgcaaggctaccagttacatttgacaagtctgtgcaatggatcaaaatcagaagagatgattcaacttggtgaccaagaagtttctgagctttgtggcctaccaagggagaaactggctgcagcagagcgagtacttcgttccaacatggacatcctgaagccaatcctgagaacactaaactctacatctcccttcccgagcaaggagctggccgaagccacaaaaacattgctgcatagtcttgggactctggcccaggagctgttcagcatgagaagctggagtgacatgcgacaggaggtgatgtttctgaccaatgtgaacagctccagctcctccacccaaatctaccaggctgtgtctcgtattgtctgcgggcatcccgagggaggggggctgaagatcaagtctctcaactggtatgaggacaacaactacaaagccctctttggaggcaatggcactgaggaagatgctgaaaccttctatgacaactctacaactccttactgcaatgatttgatgaagaatttggagtctagtcctctttcccgcattatctggaaagctctgaagccgctgctcgttgggaagatcctgtatacacctgacactccagccacaaggcaggtcatggctgaggtgaacaagaccttccaggaactggctgtgttccatgatctggaaggcatgtgggaggaactcagccccaagatctggaccttcatggagaacagccaagaaatggaccttgtccggatgctgttggacagcagggacaatgaccacttttgggaacagcagttggatggcttagattggacagcccaagacatcgtggcgtttttggccaagcacccagaggatgtccagtccagtaatggttctgtgtacacctggagagaagctttcaacgagactaaccaggcaatccggaccatatctcgcttcatggagtgtgtcaacctgaacaagctagaacccatagcaacagaagtctggctcatcaacaagtccatggagctgctggatgagaggaagttctgggctggtattgtgttcactggaattactccaggcagcattgagctgccccatcatgtcaagtacaagatccgaatggacattgacaatgtggagaggacaaataaaatcaaggatgggtactgggaccctggtcctcgagctgacccctttgaggacatgcggtacgtctgggggggcttcgcctacttgcaggatgtggtggagcaggcaatcatcagggtgctgacgggcaccgagaagaaaactggtgtctatatgcaacagatgccctatccctgttacgttgatgacatctttctgcgggtgatgagccggtcaatgcccctcttcatgacgctggcctggatttactcagtggctgtgatcatcaagggcatcgtgtatgagaaggaggcacggctgaaagagaccatgcggatcatgggcctggacaacagcatcctctggtttagctggttcattagtagcctcattcctcttcttgtgagcgctggcctgctagtggtcatcctgaagttaggaaacctgctgccctacagtgatcccagcgtggtgtttgtcttcctgtccgtgtttgctgtggtgacaatcctgcagtgcttcctgattagcacactcttctccagagccaacctggcagcagcctgtgggggcatcatctacttcacgctgtacctgccctacgtcctgtgtgtggcatggcaggactacgtgggcttcacactcaagatcttcgctagcctgctgtctcctgtggcttttgggtttggctgtgagtactttgccctttttgaggagcagggcattggagtgcagtgggacaacctgtttgagagtcctgtggaggaagatggcttcaatctcaccacttcggtctccatgatgctgtttgacaccttcctctatggggtgatgacctggtacattgaggctgtctttccaggccagtacggaattcccaggccctggtattttccttgcaccaagtcctactggtttggcgaggaaagtgatgagaagagccaccctggttccaaccagaagagaatatcagaaatctgcatggaggaggaacccacccacttgaagctgggcgtgtccattcagaacctggtaaaagtctaccgagatgggatgaaggtggctgtcgatggcctggcactgaatttttatgagggccagatcacctccttcctgggccacaatggagcggggaagacgaccaccatgtcaatcctgaccgggttgttccccccgacctcgggcaccgcctacatcctgggaaaagacattcgctctgagatgagcaccatccggcagaacctgggggtctgtccccagcataacgtgctgtttgacatgctgactgtcgaagaacacatctggttctatgcccgcttgaaagggctctctgagaagcacgtgaaggcggagatggagcagatggccctggatgttggtttgccatcaagcaagctgaaaagcaaaacaagccagctgtcaggtggaatgcagagaaagctatctgtggccttggcctttgtcgggggatctaaggttgtcattctggatgaacccacagctggtgtggacccttactcccgcaggggaatatgggagctgctgctgaaataccgacaaggccgcaccattattctctctacacaccacatggatgaagcggacgtcctgggggacaggattgccatcatctcccatgggaagctgtgctgtgtgggctcctccctgtttctgaagaaccagctgggaacaggctactacctgaccttggtcaagaaagatgtggaatcctccctcagttcctgcagaaacagtagtagcactgtgtcatacctgaaaaaggaggacagtgtttctcagagcagttctgatgctggcctgggcagcgaccatgagagtgacacgctgaccatcgatgtctctgctatctccaacctcatcaggaagcatgtgtctgaagcccggctggtggaagacatagggcatgagctgacctatgtgctgccatatgaagctgctaaggagggagcctttgtggaactctttcatgagattgatgaccggctctcagacctgggcatttctagttatggcatctcagagacgaccctggaagaaatattcctcaaggtggccgaagagagtggggtggatgctgagacctcagatggtaccttgccagcaagacgaaacaggcgggccttcggggacaagcagagctgtcttcgcccgttcactgaagatgatgctgctgatccaaatgattctgacatagacccagaatccagagagacagacttgctcagtgggatggatggcaaagggtcctaccaggtgaaaggctggaaacttacacagcaacagtttgtggcccttttgtggaagagactgctaattgccagacggagtcggaaaggattttttgctcagattgtcttgccagctgtgtttgtctgcattgcccttgtgttcagcctgatcgtgccaccctttggcaagtaccccagcctggaacttcagccctggatgtacaacgaacagtacacatttgtcagcaatgatgctcctgaggacacgggaaccctggaactcttaaacgccctcaccaaagaccctggcttcgggacccgctgtatggaaggaaacccaatcccagacacgccctgccaggcaggggaggaagagtggaccactgccccagttccccagaccatcatggacctcttccagaatgggaactggacaatgcagaacccttcacctgcatgccagtgtagcagcgacaaaatcaagaagatgctgcctgtgtgtcccccaggggcaggggggctgcctcctccacaaagaaaacaaaacactgcagatatccttcaggacctgacaggaagaaacatttcggattatctggtgaagacgtatgtgcagatcatagccaaaagcttaaagaacaagatctgggtgaatgagtttaggtatggcggcttttccctgggtgtcagtaatactcaagcacttcctccgagtcaagaagttaatgatgccaccaaacaaatgaagaaacacctaaagctggccaaggacagttctgcagatcgatttctcaacagcttgggaagatttatgacaggactggacaccagaaataatgtcaaggtgtggttcaataacaagggctggcatgcaatcagctctttcctgaatgtcatcaacaatgccattctccgggccaacctgcaaaagggagagaaccctagccattatggaattactgctttcaatcatcccctgaatctcaccaagcagcagctctcagaggtggctccgatgaccacatcagtggatgtccttgtgtccatctgtgtcatctttgcaatgtccttcgtcccagccagctttgtcgtattcctgatccaggagcgggtcagcaaagcaaaacacctgcagttcatcagtggagtgaagcctgtcatctactggctctctaattttgtctgggatatgtgcaattacgttgtccctgccacactggtcattatcatcttcatctgcttccagcagaagtcctatgtgtcctccaccaatctgcctgtgctagcccttctacttttgctgtatgggtggtcaatcacacctctcatgtacccagcctcctttgtgttcaagatccccagcacagcctatgtggtgctcaccagcgtgaacctcttcattggcattaatggcagcgtggccacctttgtgctggagctgttcaccgacaataagctgaataatatcaatgatatcctgaagtccgtgttcttgatcttcccacatttttgcctgggacgagggctcatcgacatggtgaaaaaccaggcaatggctgatgccctggaaaggtttggggagaatcgctttgtgtcaccattatcttgggacttggtgggacgaaacctcttcgccatggccgtggaaggggtggtgttcttcctcattactgttctgatccagtacagattcttcatcaggcccagacctgtaaatgcaaagctatctcctctgaatgatgaagatgaagatgtgaggcgggaaagacagagaattcttgatggtggaggccagaatgacatcttagaaatcaaggagttgacgaagatatatagaaggaagcggaagcctgctgttgacaggatttgcgtgggcattcctcctggtgagtgctttgggctcctgggagttaatggggctggaaaatcatcaactttcaagatgttaacaggagataccactgttaccagaggagatgctttccttaacagaaatagtatcttatcaaacatccatgaagtacatcagaacatgggctactgccctcagtttgatgccatcacagagctgttgactgggagagaacacgtggagttctttgcccttttgagaggagtcccagagaaagaagttggcaaggttggtgagtgggcgattcggaaactgggcctcgtgaagtatggagaaaaatatgctggtaactatagtggaggcaacaaacgcaagctctctacagccatggctttgatcggcgggcctcctgtggtgtttctggatgaacccaccacaggcatggatcccaaagcccggcggttcttgtggaattgtgccctaagtgttgtcaaggaggggagatcagtagtgcttacatctcatagtatggaagaatgtgaagctctttgcactaggatggcaatcatggtcaatggaaggttcaggtgccttggcagtgtccagcatctaaaaaataggtttggagatggttatacaatagttgtacgaatagcagggtccaacccggacctgaagcctgtccaggatttctttggacttgcatttcctggaagtgttccaaaagagaaacaccggaacatgctacaataccagcttccatcttcattatcttctctggccaggatattcagcatcctctcccagagcaaaaagcgactccacatagaagactactctgtttctcagacaacacttgaccaagtatttgtgaactttgccaaggaccaaagtgatgatgaccacttaaaagacctctcattacacaaaaaccagacagtagtggacgttgcagttctcacatcttttctacaggatgagaaagtgaaagaaagctatgtatgaagaatcctgttcatacggggtggctgaaagtaaagaggnactagactttcctttgcaccatgtgaagtgttgtggagaaaagagccagaagttgatgtgggaagaagtaaactggatactgtactgatactattcaatgcaatgcaattcaatgcaatgaaaacaaaattccattacaggggcagtgcctttgtagcctatgtcttgtatggctctcaagtgaaagacttgaatttagttttttacctatacctatgtgaaactctattatggaacccaatggacatatgggtttgaactcacactttttttttttttttgttcctgtgtattctcattggggttgcaacaataattcatcaagtaatcatggccagcgattattgatcaaaatcaaaaggtaatgcacatcctcattcactaagccatgccatgcccaggagactggtttcccggtgacacatccattgctggcaatgagtgtgccagagttattagtgccaagtttttcagaaagtttgaagcaccatggtgtgtcatgctcacttttgtgaaagctgctctgctcagagtctatcaacattgaatatcagttgacagaatggtgccatgcgtggctaacatcctgctttgattccctctgataagctgttctggtggcagtaacatgcaacaaaaatgtgggtgtctccaggcacgggaaacttggttccattgttatattgtcctatgcttcgagccatgggtctacagggtcatccttatgagactcttaaatatacttagatcctggtaagaggcaaagaatcaacagccaaactgctggggctgcaagctgctgaagccagggcatgggattaaagagattgtgcgttcaaacctagggaagcctgtgcccatttgtcctgactgtctgctaacatggtacactgcatctcaagatgtttatctgacacaagtgtattatttctggctttttgaattaatctagaaaatgaaaagatggagttgtattttgacaaaaatgtttgtactttttaatgttatttggaattttaagttctatcagtgacttctgaatccttagaatggcctctttgtagaaccctgtggtatagaggagtatggccactgccccactatttttattttcttatgtaagtttgcatatcagtcatgactagtgcctagaaagcaatgtgatggtcaggatctcatgacattatatttgagtttctttcagatcatttaggatactcttaatctcacttcatcaatcaaatattttttgagtgtatgctgtagctgaaagagtatgtacgtacgtataagactagagagatattaagtctcagtacacttcctgtgccatgttattcagctcactggtttacaaatataggttgtcttgtggttgtaggagcccactgtaacaatactgggcagcctttttttttttttttaattgcaacaatgcaaaagccaagaaagtataagggtcacaagtctaaacaatgaattcttcaacagggaaaacagctagcttgaaaacttgctgaaaaacacaacttgtgtttatggcatttagtaccttcaaataattggctttgcagatattggataccccattaaatctgacagtctcaaatttttcatctcttcaatcactagtcaagaaaaatataaaaacaacaaatacttccatatggagcatttttcagagttttctaacccagtcttatttttctagtcagtaaacatttgtaaaaatactgtttcactaatacttactgttaactgtcttgagagaaaagaaaaatatgagagaactattgtttggggaagttcaagtgatctttcaatatcattactaacttcttccactttttccaaaatttgaatattaacgctaaaggtgtaagacttcagatttcaaattaatctttctatattttttaaatttacagaatattatataacccactgctgaaaaagaaaaaaatgattgttttagaagttaaagtcaatattgattttaaatataagtaatgaaggcatatttccaataactagtgatatggcatcgttgcattttacagtatcttcaaaaatacagaatttatagaataatttctcctcatttaatatttttcaaaatcaaagttatggtttcctcattttactaaaatcgtattctaattcttcattatagtaaatctatgagcaactccttacttcggttcctctgatttcaaggccatattttaaaaaatcaaaaggcactgtgaactattttgaagaaaacacaacattttaatacagattgaaaggacctcttctgaagctagaaacaatctatagttatacatcttcattaatactgtgttaccttttaaaatagtaattttttacattttcctgtgtaaacctaattgtggtagaaatttttaccaactctatactcaatcaagcaaaatttctgtatattccctgtggaatgtacctatgtgagtttcagaaattctcaaaatacgtgttcaaaaatttctgcttttgcatctttgggacacctcagaaaacttattaacaactgtgaatatgagaaatacagaagaaaataataagccctctatacataaatgcccagcacaattcattgttaaaaaacaaccaaacctcacactactgtatttcattatctgtactgaaagcaaatgctttgtgactattaaatgttgcacatcattcattcaaaaaaaaaaaaaaaaaaa

SEQ ID NO: 121 - DNA, 9870 bp, Homo sapiens
  modified_base (7138): a, t, c or g
gtaattgcgagcgagagtgagtggggccgggacccgcagagccgagccgacccttctctcccgggctgcggcagggcagggcggggagctccgcgcaccaacagagccggttctcagggcgctttgctccttgttttttccccggttctgttttctccccttctccggaaggcttgtcaaggggtaggagaaagagacgcaaacacaaaagtggaaaacagttaatgaccagccacggcgtccctgctgtgagctctggccgctgccttccagggctcccgagccacacgctgggggtgctggctgagggaacatggcttgttggcctcagctgaggttgctgctgtggaagaacctcactttcagaagaagacaaacatgtcagctgctgctggaagtggcctggcctctatttatcttcctgatcctgatctctgttcggctgagctacccaccctatgaacaacatgaatgccattttccaaataaagccatgccctctgcaggaacacttccttgggttcaggggattatctgtaatgccaacaacccctgtttccgttacccgactcctggggaggctcccggagttgttggaaactttaacaaatccattgtggctcgcctgttctcagatgctcggaggcttcttttatacagccagaaagacaccagcatgaaggacatgcgcaaagttctgagaacattacagcagatcaagaaatccagctcaaacttgaagcttcaagatttcctggtggacaatgaaaccttctctgggttcctgtatcacaacctctctctcccaaagtctactgtggacaagatgctgagggctgatgtcattctccacaaggtatttttgcaaggctaccagttacatttgacaagtctgtgcaatggatcaaaatcagaagagatgattcaacttggtgaccaagaagtttctgagctttgtggcctaccaagggagaaactggctgcagcagagcgagtacttcgttccaacatggacatcctgaagccaatcctgagaacactaaactctacatctcccttcccgagcaaggagctggccgaagccacaaaaacattgctgcatagtcttgggactctggcccaggagctgttcagcatgagaagctggagtgacatgcgacaggaggtgatgtttctgaccaatgtgaacagctccagctcctccacccaaatctaccaggctgtgtctcgtattgtctgcgggcatcccgagggaggggggctgaagatcaagtctctcaactggtatgaggacaacaactacaaagccctctttggaggcaatggcactgaggaagatgctgaaaccttctatgacaactctacaactccttactgcaatgatttgatgaagaatttggagtctagtcctctttcccgcattatctggaaagctctgaagccgctgctcgttgggaagatcctgtatacacctgacactccagccacaaggcaggtcatggctgaggtgaacaagaccttccaggaactggctgtgttccatgatctggaaggcatgtgggaggaactcagccccaagatctggaccttcatggagaacagccaagaaatggaccttgtccggatgctgttggacagcagggacaatgaccacttttgggaacagcagttggatggcttagattggacagcccaagacatcgtggcgtttttggccaagcacccagaggatgtccagtccagtaatggttctgtgtacacctggagagaagctttcaacgagactaaccaggcaatccggaccatatctcgcttcatggagtgtgtcaacctgaacaagctagaacccatagcaacagaagtctggctcatcaacaagtccatggagctgctggatgagaggaagttctgggctggtattgtgttcactggaattactccaggcagcattgagctgccccatcatgtcaagtacaagatccgaatggacattgacaatgtggagaggacaaataaaatcaaggatgggtactgggaccctggtcctcgagctgacccctttgaggacatgcggtacgtctgggggggcttcgcctacttgcaggatgtggtggagcaggcaatcatcagggtgctgacgggcaccgagaagaaaactggtgtctatatgcaacagatgccctatccctgttacgttgatgacatctttctgcgggtgatgagccggtcaatgcccctcttcatgacgctggcctggatttactcagtggctgtgatcatcaagggcatcgtgtatgagaaggaggcacggctgaaagagaccatgcggatcatgggcctggacaacagcatcctctggtttagctggttcattagtagcctcattcctcttcttgtgagcgctggcctgctagtggtcatcctgaagttaggaaacctgctgccctacagtgatcccagcgtggtgtttgtcttcctgtccgtgtttgctgtggtgacaatcctgcagtgcttcctgattagcacactcttctccagagccaacctggcagcagcctgtgggggcatcatctacttcacgctgtacctgccctacgtcctgtgtgtggcatggcaggactacgtgggcttcacactcaagatcttcgctagcctgctgtctcctgtggcttttgggtttggctgtgagtactttgccctttttgaggagcagggcattggagtgcagtgggacaacctgtttgagagtcctgtggaggaagatggcttcaatctcaccacttcggtctccatgatgctgtttgacaccttcctctatggggtgatgacctggtacattgaggctgtctttccaggccagtacggaattcccaggccctggtattttccttgcaccaagtcctactggtttggcgaggaaagtgatgagaagagccaccctggttccaaccagaagagaatatcagaaatctgcatggaggaggaacccacccacttgaagctgggcgtgtccattcagaacctggtaaaagtctaccgagatgggatgaaggtggctgtcgatggcctggcactgaatttttatgagggccagatcacctccttcctgggccacaatggagcggggaagacgaccaccatgtcaatcctgaccgggttgttccccccgacctcgggcaccgcctacatcctgggaaaagacattcgctctgagatgagcaccatccggcagaacctgggggtctgtccccagcataacgtgctgtttgacatgctgactgtcgaagaacacatctggttctatgcccgcttgaaagggctctctgagaagcacgtgaaggcggagatggagcagatggccctggatgttggtttgccatcaagcaagctgaaaagcaaaacaagccagctgtcaggtggaatgcagagaaagctatctgtggccttggcctttgtcgggggatctaaggttgtcattctggatgaacccacagctggtgtggacccttactcccgcaggggaatatgggagctgctgctgaaataccgacaaggccgcaccattattctctctacacaccacatggatgaagcggacgtcctgggggacaggattgccatcatctcccatgggaagctgtgctgtgtgggctcctccctgtttctgaagaaccagctgggaacaggctactacctgaccttggtcaagaaagatgtggaatcctccctcagttcctgcagaaacagtagtagcactgtgtcatacctgaaaaaggaggacagtgtttctcagagcagttctgatgctggcctgggcagcgaccatgagagtgacacgctgaccatcgatgtctctgctatctccaacctcatcaggaagcatgtgtctgaagcccggctggtggaagacatagggcatgagctgacctatgtgctgccatatgaagctgctaaggagggagcctttgtggaactctttcatgagattgatgaccggctctcagacctgggcatttctagttatggcatctcagagacgaccctggaagaaatattcctcaaggtggccgaagagagtggggtggatgctgagacctcagatggtaccttgccagcaagacgaaacaggcgggccttcggggacaagcagagctgtcttcgcccgttcactgaagatgatgctgctgatccaaatgattctgacatagacccagaatccagagagacagacttgctcagtgggatggatggcaaagggtcctaccaggtgaaaggctggaaacttacacagcaacagtttgtggcccttttgtggaagagactgctaattgccagacggagtcggaaaggattttttgctcagattgtcttgccagctgtgtttgtctgcattgcccttgtgttcagcctgatcgtgccaccctttggcaagtaccccagcctggaacttcagccctggatgtacaacgaacagtacacatttgtcagcaatgatgctcctgaggacacgggaaccctggaactcttaaacgccctcaccaaagaccctggcttcgggacccgctgtatggaaggaaacccaatcccagacacgccctgccaggcaggggaggaagagtggaccactgccccagttccccagaccatcatggacctcttccagaatgggaactggacaatgcagaacccttcacctgcatgccagtgtagcagcgacaaaatcaagaagatgctgcctgtgtgtcccccaggggcaggggggctgcctcctccacaaagaaaacaaaacactgcagatatccttcaggacctgacaggaagaaacatttcggattatctggtgaagacgtatgtgcagatcatagccaaaagcttaaagaacaagatctgggtgaatgagtttaggtatggcggcttttccctgggtgtcagtaatactcaagcacttcctccgagtcaagaagttaatgatgccaccaaacaaatgaagaaacacctaaagctggccaaggacagttctgcagatcgatttctcaacagcttgggaagatttatgacaggactggacaccagaaataatgtcaaggtgtggttcaataacaagggctggcatgcaatcagctctttcctgaatgtcatcaacaatgccattctccgggccaacctgcaaaagggagagaaccctagccattatggaattactgctttcaatcatcccctgaatctcaccaagcagcagctctcagaggtggctccgatgaccacatcagtggatgtccttgtgtccatctgtgtcatctttgcaatgtccttcgtcccagccagctttgtcgtattcctgatccaggagcgggtcagcaaagcaaaacacctgcagttcatcagtggagtgaagcctgtcatctactggctctctaattttgtctgggatatgtgcaattacgttgtccctgccacactggtcattatcatcttcatctgcttccagcagaagtcctatgtgtcctccaccaatctgcctgtgctagcccttctacttttgctgtatgggtggtcaatcacacctctcatgtacccagcctcctttgtgttcaagatccccagcacagcctatgtggtgctcaccagcgtgaacctcttcattggcattaatggcagcgtggccacctttgtgctggagctgttcaccgacaataagctgaataatatcaatgatatcctgaagtccgtgttcttgatcttcccacatttttgcctgggacgagggctcatcgacatggtgaaaaaccaggcaatggctgatgccctggaaaggtttggggagaatcgctttgtgtcaccattatcttgggacttggtgggacgaaacctcttcgccatggccgtggaaggggtggtgttcttcctcattactgttctgatccagtacagattcttcatcaggcccagacctgtaaatgcaaagctatctcctctgaatgatgaagatgaagatgtgaggcgggaaagacagagaattcttgatggtggaggccagaatgacatcttagaaatcaaggagttgacgaagatatatagaaggaagcggaagcctgctgttgacaggatttgcgtgggcattcctcctggtgagtgctttgggctcctgggagttaatggggctggaaaatcatcaactttcaagatgttaacaggagataccactgttaccagaggagatgctttccttaacagaaatagtatcttatcaaacatccatgaagtacatcagaacatgggctactgccctcagtttgatgccatcacagagctgttgactgggagagaacacgtggagttctttgcccttttgagaggagtcccagagaaagaagttggcaaggttggtgagtgggcgattcggaaactgggcctcgtgaagtatggagaaaaatatgctggtaactatagtggaggcaacaaacgcaagctctctacagccatggctttgatcggcgggcctcctgtggtgtttctggatgaacccaccacaggcatggatcccaaagcccggcggttcttgtggaattgtgccctaagtgttgtcaaggaggggagatcagtagtgcttacatctcatagtatggaagaatgtgaagctctttgcactaggatggcaatcatggtcaatggaaggttcaggtgccttggcagtgtccagcatctaaaaaataggtttggagatggttatacaatagttgtacgaatagcagggtccaacccggacctgaagcctgtccaggatttctttggacttgcatttcctggaagtgttccaaaagagaaacaccggaacatgctacaataccagcttccatcttcattatcttctctggccaggatattcagcatcctctcccagagcaaaaagcgactccacatagaagactactctgtttctcagacaacacttgaccaagtatttgtgaactttgccaaggaccaaagtgatgatgaccacttaaaagacctctcattacacaaaaaccagacagtagtggacgttgcagttctcacatcttttctacaggatgagaaagtgaaagaaagctatgtatgaagaatcctgttcatacggggtggctgaaagtaaagaggnactagactttcctttgcaccatgtgaagtgttgtggagaaaagagccagaagttgatgtgggaagaagtaaactggatactgtactgatactattcaatgcaatgcaattcaatgcaatgaaaacaaaattccattacaggggcagtgcctttgtagcctatgtcttgtatggctctcaagtgaaagacttgaatttagttttttacctatacctatgtgaaactctattatggaacccaatggacatatgggtttgaactcacactttttttttttttttgttcctgtgtattctcattggggttgcaacaataattcatcaagtaatcatggccagcgattattgatcaaaatcaaaaggtaatgcacatcctcattcactaagccatgccatgcccaggagactggtttcccggtgacacatccattgctggcaatgagtgtgccagagttattagtgccaagtttttcagaaagtttgaagcaccatggtgtgtcatgctcacttttgtgaaagctgctctgctcagagtctatcaacattgaatatcagttgacagaatggtgccatgcgtggctaacatcctgctttgattccctctgataagctgttctggtggcagtaacatgcaacaaaaatgtgggtgtctctaggcacgggaaacttggttccattgttatattgtcctatgcttcgagccatgggtctacagggtcatccttatgagactcttaaatatacttagatcctggtaagaggcaaagaatcaacagccaaactgctggggctgcaagctgctgaagccagggcatgggattaaagagattgtgcgttcaaacctagggaagcctgtgcccatttgtcctgactgtctgctaacatggtacactgcatctcaagatgtttatctgacacaagtgtattatttctggctttttgaattaatctagaaaatgaaaagatggagttgtattttgacaaaaatgtttgtactttttaatgttatttggaattttaagttctatcagtgacttctgaatccttagaatggcctctttgtagaaccctgtggtatagaggagtatggccactgccccactatttttattttcttatgtaagtttgcatatcagtcatgactagtgcctagaaagcaatgtgatggtcaggatctcatgacattatatttgagtttctttcagatcatttaggatactcttaatctcacttcatcaatcaaatattttttgagtgtatgctgtagctgaaagagtatgtacgtacgtataagactagagagatattaagtctcagtacacttcctgtgccatgttattcagctcactggtttacaaatataggttgtcttgtggttgtaggagcccactgtaacaatattgggcagcctttttttttttttttaattgcaacaatgcaaaagccaagaaagtataagggtcacaagtctaaacaatgaattcttcaacagggaaaacagctagcttgaaaacttgctgaaaaacacaacttgtgtttatggcatttagtaccttcaaataattggctttgcagatattggataccccattaaatctgacagtctcaaatttttcatctcttcaatcactagtcaagaaaaatataaaaacaacaaatacttccatatggagcatttttcagagttttctaacccagtcttatttttctagtcagtaaacatttgtaaaaatactgtttcactaatacttactgttaactgtcttgagagaaaagaaaaatatgagagaactattgtttggggaagttcaagtgatctttcaatatcattactaacttcttccactttttccaaaatttgaatattaacgctaaaggtgtaagacttcagatttcaaattaatctttctatattttttaaatttacagaatattatataacccactgctgaaaaagaaaaaaatgattgttttagaagttaaagtcaatattgattttaaatataagtaatgaaggcatatttccaataactagtgatatggcatcgttgcattttacagtatcttcaaaaatacagaatttatagaataatttctcctcatttaatatttttcaaaatcaaagttatggtttcctcattttactaaaatcgtattctaattcttcattatagtaaatctatgagcaactccttacttcggttcctctgatttcaaggccatattttaaaaaatcaaaaggcactgtgaactattttgaagaaaacacaacattttaatacagattgaaaggacctcttctgaagctagaaacaatctatagttatacatcttcattaatactgtgttaccttttaaaatagtaattttttacattttcctgtgtaaacctaattgtggtagaaatttttaccaactctatactcaatcaagcaaaatttctgtatattccctgtggaatgtacctatgtgagtttcagaaattctcaaaatacgtgttcaaaaatttctgcttttgcatctttgggacacctcagaaaacttattaacaactgtgaatatgagaaatacagaagaaaataataagccctctatacataaatgcccagcacaattcattgttaaaaaacaaccaaacctcacactactgtatttcattatctgtactgaaagcaaatgctttgtgactattaaatgttgcacatcattcattcaaaaaaaaaaaaaaaaaaa

SEQ ID NO: 122 - DNA, 9870 bp, Homo sapiens
  modified_base (7138): a, t, c or g
gtaattgcgagcgagagtgagtggggccgggacccgcagagccgagccgacccttctctcccgggctgcggcagggcagggcggggagctccgcgcaccaacagagccggttctcagggcgctttgctccttgttttttccccggttctgttttctccccttctccggaaggcttgtcaaggggtaggagaaagagacgcaaacacaaaagtggaaaacagttaatgaccagccacggcgtccctgctgtgagctctggccgctgccttccagggctcccgagccacacgctgggggtgctggctgagggaacatggcttgttggcctcagctgaggttgctgctgtggaagaacctcactttcagaagaagacaaacatgtcagctgctgctggaagtggcctggcctctatttatcttcctgatcctgatctctgttcggctgagctacccaccctatgaacaacatgaatgccattttccaaataaagccatgccctctgcaggaacacttccttgggttcaggggattatctgtaatgccaacaacccctgtttccgttacccgactcctggggaggctcccggagttgttggaaactttaacaaatccattgtggctcgcctgttctcagatgctcggaggcttcttttatacagccagaaagacaccagcatgaaggacatgcgcaaagttctgagaacattacagcagatcaagaaatccagctcaaacttgaagcttcaagatttcctggtggacaatgaaaccttctctgggttcctgtatcacaacctctctctcccaaagtctactgtggacaagatgctgagggctgatgtcattctccacaaggtatttttgcaaggctaccagttacatttgacaagtctgtgcaatggatcaaaatcagaagagatgattcaacttggtgaccaagaagtttctgagctttgtggcctaccaagggagaaactggctgcagcagagcgagtacttcgttccaacatggacatcctgaagccaatcctgagaacactaaactctacatctcccttcccgagcaaggagctggccgaagccacaaaaacattgctgcatagtcttgggactctggcccaggagctgttcagcatgagaagctggagtgacatgcgacaggaggtgatgtttctgaccaatgtgaacagctccagctcctccacccaaatctaccaggctgtgtctcgtattgtctgcgggcatcccgagggaggggggctgaagatcaagtctctcaactggtatgaggacaacaactacaaagccctctttggaggcaatggcactgaggaagatgctgaaaccttctatgacaactctacaactccttactgcaatgatttgatgaagaatttggagtctagtcctctttcccgcattatctggaaagctctgaagccgctgctcgttgggaagatcctgtatacacctgacactccagccacaaggcaggtcatggctgaggtgaacaagaccttccaggaactggctgtgttccatgatctggaaggcatgtgggaggaactcagccccaagatctggaccttcatggagaacagccaagaaatggaccttgtccggatgctgttggacagcagggacaatgaccacttttgggaacagcagttggatggcttagattggacagcccaagacatcgtggcgtttttggccaagcacccagaggatgtccagtccagtaatggttctgtgtacacctggagagaagctttcaacgagactaaccaggcaatccggaccatatctcgcttcatggagtgtgtcaacctgaacaagctagaacccatagcaacagaagtctggctcatcaacaagtccatggagctgctggatgagaggaagttctgggctggtattgtgttcactggaattactccaggcagcattgagctgccccatcatgtcaagtacaagatccgaatggacattgacaatgtggagaggacaaataaaatcaaggatgggtactgggaccctggtcctcgagctgacccctttgaggacatgcggtacgtctgggggggcttcgcctacttgcaggatgtggtggagcaggcaatcatcagggtgctgacgggcaccgagaagaaaactggtgtctatatgcaacagatgccctatccctgttacgttgatgacatctttctgcgggtgatgagccggtcaatgcccctcttcatgacgctggcctggatttactcagtggctgtgatcatcaagggcatcgtgtatgagaaggaggcacggctgaaagagaccatgcggatcatgggcctggacaacagcatcctctggtttagctggttcattagtagcctcattcctcttcttgtgagcgctggcctgctagtggtcatcctgaagttaggaaacctgctgccctacagtgatcccagcgtggtgtttgtcttcctgtccgtgtttgctgtggtgacaatcctgcagtgcttcctgattagcacactcttctccagagccaacctggcagcagcctgtgggggcatcatctacttcacgctgtacctgccctacgtcctgtgtgtggcatggcaggactacgtgggcttcacactcaagatcttcgctagcctgctgtctcctgtggcttttgggtttggctgtgagtactttgccctttttgaggagcagggcattggagtgcagtgggacaacctgtttgagagtcctgtggaggaagatggcttcaatctcaccacttcggtctccatgatgctgtttgacaccttcctctatggggtgatgacctggtacattgaggctgtctttccaggccagtacggaattcccaggccctggtattttccttgcaccaagtcctactggtttggcgaggaaagtgatgagaagagccaccctggttccaaccagaagagaatatcagaaatctgcatggaggaggaacccacccacttgaagctgggcgtgtccattcagaacctggtaaaagtctaccgagatgggatgaaggtggctgtcgatggcctggcactgaatttttatgagggccagatcacctccttcctgggccacaatggagcggggaagacgaccaccatgtcaatcctgaccgggttgttccccccgacctcgggcaccgcctacatcctgggaaaagacattcgctctgagatgagcaccatccggcagaacctgggggtctgtccccagcataacgtgctgtttgacatgctgactgtcgaagaacacatctggttctatgcccgcttgaaagggctctctgagaagcacgtgaaggcggagatggagcagatggccctggatgttggtttgccatcaagcaagctgaaaagcaaaacaagccagctgtcaggtggaatgcagagaaagctatctgtggccttggcctttgtcgggggatctaaggttgtcattctggatgaacccacagctggtgtggacccttactcccgcaggggaatatgggagctgctgctgaaataccgacaaggccgcaccattattctctctacacaccacatggatgaagcggacgtcctgggggacaggattgccatcatctcccatgggaagctgtgctgtgtgggctcctccctgtttctgaagaaccagctgggaacaggctactacctgaccttggtcaagaaagatgtggaatcctccctcagttcctgcagaaacagtagtagcactgtgtcatacctgaaaaaggaggacagtgtttctcagagcagttctgatgctggcctgggcagcgaccatgagagtgacacgctgaccatcgatgtctctgctatctccaacctcatcaggaagcatgtgtctgaagcccggctggtggaagacatagggcatgagctgacctatgtgctgccatatgaagctgctaaggagggagcctttgtggaactctttcatgagattgatgaccggctctcagacctgggcatttctagttatggcatctcagagacgaccctggaagaaatattcctcaaggtggccgaagagagtggggtggatgctgagacctcagatggtaccttgccagcaagacgaaacaggcgggccttcggggacaagcagagctgtcttcgcccgttcactgaagatgatgctgctgatccaaatgattctgacatagacccagaatccagagagacagacttgctcagtgggatggatggcaaagggtcctaccaggtgaaaggctggaaacttacacagcaacagtttgtggcccttttgtggaagagactgctaattgccagacggagtcggaaaggattttttgctcagattgtcttgccagctgtgtttgtctgcattgcccttgtgttcagcctgatcgtgccaccctttggcaagtaccccagcctggaacttcagccctggatgtacaacgaacagtacacatttgtcagcaatgatgctcctgaggacacgggaaccctggaactcttaaacgccctcaccaaagaccctggcttcgggacccgctgtatggaaggaaacccaatcccagacacgccctgccaggcaggggaggaagagtggaccactgccccagttccccagaccatcatggacctcttccagaatgggaactggacaatgcagaacccttcacctgcatgccagtgtagcagcgacaaaatcaagaagatgctgcctgtgtgtcccccaggggcaggggggctgcctcctccacaaagaaaacaaaacactgcagatatccttcaggacctgacaggaagaaacatttcggattatctggtgaagacgtatgtgcagatcatagccaaaagcttaaagaacaagatctgggtgaatgagtttaggtatggcggcttttccctgggtgtcagtaatactcaagcacttcctccgagtcaagaagttaatgatgccaccaaacaaatgaagaaacacctaaagctggccaaggacagttctgcagatcgatttctcaacagcttgggaagatttatgacaggactggacaccagaaataatgtcaaggtgtggttcaataacaagggctggcatgcaatcagctctttcctgaatgtcatcaacaatgccattctccgggccaacctgcaaaagggagagaaccctagccattatggaattactgctttcaatcatcccctgaatctcaccaagcagcagctctcagaggtggctccgatgaccacatcagtggatgtccttgtgtccatctgtgtcatctttgcaatgtccttcgtcccagccagctttgtcgtattcctgatccaggagcgggtcagcaaagcaaaacacctgcagttcatcagtggagtgaagcctgtcatctactggctctctaattttgtctgggatatgtgcaattacgttgtccctgccacactggtcattatcatcttcatctgcttccagcagaagtcctatgtgtcctccaccaatctgcctgtgctagcccttctacttttgctgtatgggtggtcaatcacacctctcatgtacccagcctcctttgtgttcaagatccccagcacagcctatgtggtgctcaccagcgtgaacctcttcattggcattaatggcagcgtggccacctttgtgctggagctgttcaccgacaataagctgaataatatcaatgatatcctgaagtccgtgttcttgatcttcccacatttttgcctgggacgagggctcatcgacatggtgaaaaaccaggcaatggctgatgccctggaaaggtttggggagaatcgctttgtgtcaccattatcttgggacttggtgggacgaaacctcttcgccatggccgtggaaggggtggtgttcttcctcattactgttctgatccagtacagattcttcatcaggcccagacctgtaaatgcaaagctatctcctctgaatgatgaagatgaagatgtgaggcgggaaagacagagaattcttgatggtggaggccagaatgacatcttagaaatcaaggagttgacgaagatatatagaaggaagcggaagcctgctgttgacaggatttgcgtgggcattcctcctggtgagtgctttgggctcctgggagttaatggggctggaaaatcatcaactttcaagatgttaacaggagataccactgttaccagaggagatgctttccttaacagaaatagtatcttatcaaacatccatgaagtacatcagaacatgggctactgccctcagtttgatgccatcacagagctgttgactgggagagaacacgtggagttctttgcccttttgagaggagtcccagagaaagaagttggcaaggttggtgagtgggcgattcggaaactgggcctcgtgaagtatggagaaaaatatgctggtaactatagtggaggcaacaaacgcaagctctctacagccatggctttgatcggcgggcctcctgtggtgtttctggatgaacccaccacaggcatggatcccaaagcccggcggttcttgtggaattgtgccctaagtgttgtcaaggaggggagatcagtagtgcttacatctcatagtatggaagaatgtgaagctctttgcactaggatggcaatcatggtcaatggaaggttcaggtgccttggcagtgtccagcatctaaaaaataggtttggagatggttatacaatagttgtacgaatagcagggtccaacccggacctgaagcctgtccaggatttctttggacttgcatttcctggaagtgttccaaaagagaaacaccggaacatgctacaataccagcttccatcttcattatcttctctggccaggatattcagcatcctctcccagagcaaaaagcgactccacatagaagactactctgtttctcagacaacacttgaccaagtatttgtgaactttgccaaggaccaaagtgatgatgaccacttaaaagacctctcattacacaaaaaccagacagtagtggacgttgcagttctcacatcttttctacaggatgagaaagtgaaagaaagctatgtatgaagaatcctgttcatacggggtggctgaaagtaaagaggnactagactttcctttgcaccatgtgaagtgttgtggagaaaagagccagaagttgatgtgggaagaagtaaactggatactgtactgatactattcaatgcaatgcaattcaatgcaatgaaaacaaaattccattacaggggcagtgcctttgtagcctatgtcttgtatggctctcaagtgaaagacttgaatttagttttttacctatacctatgtgaaactctattatggaacccaatggacatatgggtttgaactcacactttttttttttttttgttcctgtgtattctcattggggttgcaacaataattcatcaagtaatcatggccagcgattattgatcaaaatcaaaaggtaatgcacatcctcattcactaagccatgccatgcccaggagactggtttcccggtgacacatccattgctggcaatgagtgtgccagagttattagtgccaagtttttcagaaagtttgaagcaccatggtgtgtcatgctcacttttgtgaaagctgctctgctcagagtctatcaacattgaatatcagttgacagaatggtgccatgcgtggctaacatcctgctttgattccctctgataagctgttctggtggcagtaacatgcaacaaaaatgtgggtgtctctaggcacgggaaacttggttccattgttatattgtcctatgcttcgagccatgggtctacagggtcatccttatgagactcttaaatatacttagatcctggtaagaggcaaagaatcaacagccaaactgctggggctgcaagctgctgaagccagggcatgggattaaagagattgtgcgttcaaacctagggaagcctgtgcccatttgtcctgactgtctgctaacatggtacactgcatctcaagatgtttatctgacacaagtgtattatttctggctttttgaattaatctagaaaatgaaaagatggagttgtattttgacaaaaatgtttgtactttttaatgttatttggaattttaagttctatcagtgacttctgaatccttagaatggcctctttgtagaaccctgtggtatagaggagtatggccactgccccactatttttattttcttatgtaagtttgcatatcagtcatgactagtgcctagaaagcaatgtgatggtcaggatctcatgacattatatttgagtttctttcagatcatttaggatactcttaatctcacttcatcaatcaaatattttttgagtgtatgctgtagctgaaagagtatgtacgtacgtataagactagagagatattaagtctcagtacacttcctgtgccatgttattcagctcactggtttacaaatataggttgtcttgtggttgtaggagcccactgtaacaatactgggcagcctttttttttttttttaattgcaacaatgcaaaagccaagaaagtataagggtcacaagtctaaacaatgaattcttcaacagggaaaacagctagcttgaaaacttgctgaaaaacacaacttgtgtttatggcatttagtaccttcaaataattggctttgcagatattggataccccattaaatctgacagtctcaaatatttcatctcttcaatcactagtcaagaaaaatataaaaacaacaaatacttccatatggagcatttttcagagttttctaacccagtcttatttttctagtcagtaaacatttgtaaaaatactgtttcactaatacttactgttaactgtcttgagagaaaagaaaaatatgagagaactattgtttggggaagttcaagtgatctttcaatatcattactaacttcttccactttttccaaaatttgaatattaacgctaaaggtgtaagacttcagatttcaaattaatctttctatattttttaaatttacagaatattatataacccactgctgaaaaagaaaaaaatgattgttttagaagttaaagtcaatattgattttaaatataagtaatgaaggcatatttccaataactagtgatatggcatcgttgcattttacagtatcttcaaaaatacagaatttatagaataatttctcctcatttaatatttttcaaaatcaaagttatggtttcctcattttactaaaatcgtattctaattcttcattatagtaaatctatgagcaactccttacttcggttcctctgatttcaaggccatattttaaaaaatcaaaaggcactgtgaactattttgaagaaaacacaacattttaatacagattgaaaggacctcttctgaagctagaaacaatctatagttatacatcttcattaatactgtgttaccttttaaaatagtaattttttacattttcctgtgtaaacctaattgtggtagaaatttttaccaactctatactcaatcaagcaaaatttctgtatattccctgtggaatgtacctatgtgagtttcagaaattctcaaaatacgtgttcaaaaatttctgcttttgcatctttgggacacctcagaaaacttattaacaactgtgaatatgagaaatacagaagaaaataataagccctctatacataaatgcccagcacaattcattgttaaaaaacaaccaaacctcacactactgtatttcattatctgtactgaaagcaaatgctttgtgactattaaatgttgcacatcattcattcaaaaaaaaaaaaaaaaaaa

SEQ ID NO: 123 - DNA, 9870 bp, Homo sapiens
  modified_base (7138): a, t, c or g
gtaattgcgagcgagagtgagtggggccgggacccgcagagccgagccgacccttctctcccgggctgcggcagggcagggcggggagctccgcgcaccaacagagccggttctcagggcgctttgctccttgttttttccccggttctgttttctccccttctccggaaggcttgtcaaggggtaggagaaagagacgcaaacacaaaagtggaaaacagttaatgaccagccacggcgtccctgctgtgagctctggccgctgccttccagggctcccgagccacacgctgggggtgctggctgagggaacatggcttgttggcctcagctgaggttgctgctgtggaagaacctcactttcagaagaagacaaacatgtcagctgctgctggaagtggcctggcctctatttatcttcctgatcctgatctctgttcggctgagctacccaccctatgaacaacatgaatgccattttccaaataaagccatgccctctgcaggaacacttccttgggttcaggggattatctgtaatgccaacaacccctgtttccgttacccgactcctggggaggctcccggagttgttggaaactttaacaaatccattgtggctcgcctgttctcagatgctcggaggcttcttttatacagccagaaagacaccagcatgaaggacatgcgcaaagttctgagaacattacagcagatcaagaaatccagctcaaacttgaagcttcaagatttcctggtggacaatgaaaccttctctgggttcctgtatcacaacctctctctcccaaagtctactgtggacaagatgctgagggctgatgtcattctccacaaggtatttttgcaaggctaccagttacatttgacaagtctgtgcaatggatcaaaatcagaagagatgattcaacttggtgaccaagaagtttctgagctttgtggcctaccaagggagaaactggctgcagcagagcgagtacttcgttccaacatggacatcctgaagccaatcctgagaacactaaactctacatctcccttcccgagcaaggagctggccgaagccacaaaaacattgctgcatagtcttgggactctggcccaggagctgttcagcatgagaagctggagtgacatgcgacaggaggtgatgtttctgaccaatgtgaacagctccagctcctccacccaaatctaccaggctgtgtctcgtattgtctgcgggcatcccgagggaggggggctgaagatcaagtctctcaactggtatgaggacaacaactacaaagccctctttggaggcaatggcactgaggaagatgctgaaaccttctatgacaactctacaactccttactgcaatgatttgatgaagaatttggagtctagtcctctttcccgcattatctggaaagctctgaagccgctgctcgttgggaagatcctgtatacacctgacactccagccacaaggcaggtcatggctgaggtgaacaagaccttccaggaactggctgtgttccatgatctggaaggcatgtgggaggaactcagccccaagatctggaccttcatggagaacagccaagaaatggaccttgtccggatgctgttggacagcagggacaatgaccacttttgggaacagcagttggatggcttagattggacagcccaagacatcgtggcgtttttggccaagcacccagaggatgtccagtccagtaatggttctgtgtacacctggagagaagctttcaacgagactaaccaggcaatccggaccatatctcgcttcatggagtgtgtcaacctgaacaagctagaacccatagcaacagaagtctggctcatcaacaagtccatggagctgctggatgagaggaagttctgggctggtattgtgttcactggaattactccaggcagcattgagctgccccatcatgtcaagtacaagatccgaatggacattgacaatgtggagaggacaaataaaatcaaggatgggtactgggaccctggtcctcgagctgacccctttgaggacatgcggtacgtctgggggggcttcgcctacttgcaggatgtggtggagcaggcaatcatcagggtgctgacgggcaccgagaagaaaactggtgtctatatgcaacagatgccctatccctgttacgttgatgacatctttctgcgggtgatgagccggtcaatgcccctcttcatgacgctggcctggatttactcagtggctgtgatcatcaagggcatcgtgtatgagaaggaggcacggctgaaagagaccatgcggatcatgggcctggacaacagcatcctctggtttagctggttcattagtagcctcattcctcttcttgtgagcgctggcctgctagtggtcatcctgaagttaggaaacctgctgccctacagtgatcccagcgtggtgtttgtcttcctgtccgtgtttgctgtggtgacaatcctgcagtgcttcctgattagcacactcttctccagagccaacctggcagcagcctgtgggggcatcatctacttcacgctgtacctgccctacgtcctgtgtgtggcatggcaggactacgtgggcttcacactcaagatcttcgctagcctgctgtctcctgtggcttttgggtttggctgtgagtactttgccctttttgaggagcagggcattggagtgcagtgggacaacctgtttgagagtcctgtggaggaagatggcttcaatctcaccacttcggtctccatgatgctgtttgacaccttcctctatggggtgatgacctggtacattgaggctgtctttccaggccagtacggaattcccaggccctggtattttccttgcaccaagtcctactggtttggcgaggaaagtgatgagaagagccaccctggttccaaccagaagagaatatcagaaatctgcatggaggaggaacccacccacttgaagctgggcgtgtccattcagaacctggtaaaagtctaccgagatgggatgaaggtggctgtcgatggcctggcactgaatttttatgagggccagatcacctccttcctgggccacaatggagcggggaagacgaccaccatgtcaatcctgaccgggttgttccccccgacctcgggcaccgcctacatcctgggaaaagacattcgctctgagatgagcaccatccggcagaacctgggggtctgtccccagcataacgtgctgtttgacatgctgactgtcgaagaacacatctggttctatgcccgcttgaaagggctctctgagaagcacgtgaaggcggagatggagcagatggccctggatgttggtttgccatcaagcaagctgaaaagcaaaacaagccagctgtcaggtggaatgcagagaaagctatctgtggccttggcctttgtcgggggatctaaggttgtcattctggatgaacccacagctggtgtggacccttactcccgcaggggaatatgggagctgctgctgaaataccgacaaggccgcaccattattctctctacacaccacatggatgaagcggacgtcctgggggacaggattgccatcatctcccatgggaagctgtgctgtgtgggctcctccctgtttctgaagaaccagctgggaacaggctactacctgaccttggtcaagaaagatgtggaatcctccctcagttcctgcagaaacagtagtagcactgtgtcatacctgaaaaaggaggacagtgtttctcagagcagttctgatgctggcctgggcagcgaccatgagagtgacacgctgaccatcgatgtctctgctatctccaacctcatcaggaagcatgtgtctgaagcccggctggtggaagacatagggcatgagctgacctatgtgctgccatatgaagctgctaaggagggagcctttgtggaactctttcatgagattgatgaccggctctcagacctgggcatttctagttatggcatctcagagacgaccctggaagaaatattcctcaaggtggccgaagagagtggggtggatgctgagacctcagatggtaccttgccagcaagacgaaacaggcgggccttcggggacaagcagagctgtcttcgcccgttcactgaagatgatgctgctgatccaaatgattctgacatagacccagaatccagagagacagacttgctcagtgggatggatggcaaagggtcctaccaggtgaaaggctggaaacttacacagcaacagtttgtggcccttttgtggaagagactgctaattgccagacggagtcggaaaggattttttgctcagattgtcttgccagctgtgtttgtctgcattgcccttgtgttcagcctgatcgtgccaccctttggcaagtaccccagcctggaacttcagccctggatgtacaacgaacagtacacatttgtcagcaatgatgctcctgaggacacgggaaccctggaactcttaaacgccctcaccaaagaccctggcttcgggacccgctgtatggaaggaaacccaatcccagacacgccctgccaggcaggggaggaagagtggaccactgccccagttccccagaccatcatggacctcttccagaatgggaactggacaatgcagaacccttcacctgcatgccagtgtagcagcgacaaaatcaagaagatgctgcctgtgtgtcccccaggggcaggggggctgcctcctccacaaagaaaacaaaacactgcagatatccttcaggacctgacaggaagaaacatttcggattatctggtgaagacgtatgtgcagatcatagccaaaagcttaaagaacaagatctgggtgaatgagtttaggtatggcggcttttccctgggtgtcagtaatactcaagcacttcctccgagtcaagaagttaatgatgccaccaaacaaatgaagaaacacctaaagctggccaaggacagttctgcagatcgatttctcaacagcttgggaagatttatgacaggactggacaccagaaataatgtcaaggtgtggttcaataacaagggctggcatgcaatcagctctttcctgaatgtcatcaacaatgccattctccgggccaacctgcaaaagggagagaaccctagccattatggaattactgctttcaatcatcccctgaatctcaccaagcagcagctctcagaggtggctccgatgaccacatcagtggatgtccttgtgtccatctgtgtcatctttgcaatgtccttcgtcccagccagctttgtcgtattcctgatccaggagcgggtcagcaaagcaaaacacctgcagttcatcagtggagtgaagcctgtcatctactggctctctaattttgtctgggatatgtgcaattacgttgtccctgccacactggtcattatcatcttcatctgcttccagcagaagtcctatgtgtcctccaccaatctgcctgtgctagcccttctacttttgctgtatgggtggtcaatcacacctctcatgtacccagcctcctttgtgttcaagatccccagcacagcctatgtggtgctcaccagcgtgaacctcttcattggcattaatggcagcgtggccacctttgtgctggagctgttcaccgacaataagctgaataatatcaatgatatcctgaagtccgtgttcttgatcttcccacatttttgcctgggacgagggctcatcgacatggtgaaaaaccaggcaatggctgatgccctggaaaggtttggggagaatcgctttgtgtcaccattatcttgggacttggtgggacgaaacctcttcgccatggccgtggaaggggtggtgttcttcctcattactgttctgatccagtacagattcttcatcaggcccagacctgtaaatgcaaagctatctcctctgaatgatgaagatgaagatgtgaggcgggaaagacagagaattcttgatggtggaggccagaatgacatcttagaaatcaaggagttgacgaagatatatagaaggaagcggaagcctgctgttgacaggatttgcgtgggcattcctcctggtgagtgctttgggctcctgggagttaatggggctggaaaatcatcaactttcaagatgttaacaggagataccactgttaccagaggagatgctttccttaacagaaatagtatcttatcaaacatccatgaagtacatcagaacatgggctactgccctcagtttgatgccatcacagagctgttgactgggagagaacacgtggagttctttgcccttttgagaggagtcccagagaaagaagttggcaaggttggtgagtgggcgattcggaaactgggcctcgtgaagtatggagaaaaatatgctggtaactatagtggaggcaacaaacgcaagctctctacagccatggctttgatcggcgggcctcctgtggtgtttctggatgaacccaccacaggcatggatcccaaagcccggcggttcttgtggaattgtgccctaagtgttgtcaaggaggggagatcagtagtgcttacatctcatagtatggaagaatgtgaagctctttgcactaggatggcaatcatggtcaatggaaggttcaggtgccttggcagtgtccagcatctaaaaaataggtttggagatggttatacaatagttgtacgaatagcagggtccaacccggacctgaagcctgtccaggatttctttggacttgcatttcctggaagtgttccaaaagagaaacaccggaacatgctacaataccagcttccatcttcattatcttctctggccaggatattcagcatcctctcccagagcaaaaagcgactccacatagaagactactctgtttctcagacaacacttgaccaagtatttgtgaactttgccaaggaccaaagtgatgatgaccacttaaaagacctctcattacacaaaaaccagacagtagtggacgttgcagttctcacatcttttctacaggatgagaaagtgaaagaaagctatgtatgaagaatcctgttcatacggggtggctgaaagtaaagaggnactagactttcctttgcaccatgtgaagtgttgtggagaaaagagccagaagttgatgtgggaagaagtaaactggatactgtactgatactattcaatgcaatgcaattcaatgcaatgaaaacaaaattccattacaggggcagtgcctttgtagcctatgtcttgtatggctctcaagtgaaagacttgaatttagttttttacctatacctatgtgaaactctattatggaacccaatggacatatgggtttgaactcacactttttttttttttttgttcctgtgtattctcattggggttgcaacaataattcatcaagtaatcatggccagcgattattgatcaaaatcaaaaggtaatgcacatcctcattcactaagccatgccatgcccaggagactggtttcccggtgacacatccattgctggcaatgagtgtgccagagttattagtgccaagtttttcagaaagtttgaagcaccatggtgtgtcatgctcacttttgtgaaagctgctctgctcagagtctatcaacattgaatatcagttgacagaatggtgccatgcgtggctaacatcctgctttgattccctctgataagctgttctggtggcagtaacatgcaacaaaaatgtgggtgtctctaggcacgggaaacttggttccattgttatattgtcctatgcttcgagccatgggtctacagggtcatccttatgagactcttaaatatacttagatcctggtaagaggcaaagaatcaacagccaaactgctggggctgcaagctgctgaagccagggcatgggattaaagagattgtgcgttcaaacctagggaagcctgtgcccatttgtcctgactgtctgctaacatggtacactgcatctcaagatgtttatctgacacaagtgtattatttctggctttttgaattaatctagaaaatgaaaagatggagttgtattttgacaaaaatgtttgtactttttaatgttatttggaattttaagttctatcagtgacttctgaatccttagaatggcctctttgtagaaccctgtggtatagaggagtatggccactgccccactatttttattttcttatgtaagtttgcatatcagtcatgactagtgcctagaaagcaatgtgatggtcaggatctcatgacattatatttgagtttctttcagatcatttaggatactcttaatctcacttcatcaatcaaatattttttgagtgtatgctgtagctgaaagagtatgtacgtacgtataagactagagagatattaagtctcagtacacttcctgtgccatgttattcagctcactggtttacaaatataggttgtcttgtggttgtaggagcccactgtaacaatactgggcagcctttttttttttttttaattgcaacaatgcaaaagccaagaaagtataagggtcacaagtctaaacaatgaattcttcaacagggaaaacagctagcttgaaaacttgctgaaaaacacaacttgtgtttatggcatttagtaccttcaaataattggctttgcagatattggataccccattaaatctgacagtctcaaatttttcatctcttcaatcactagtcaagaaaaatataaaaacaacaaatacttccatatggagcatttttcagagttttctaacccagtcttatttttctagtcagtaaacatttgtaaaaatactgtttcactaatacttactgttaactgtcttgagagaaaagaaaaatatgagagaactattgtttggggaagttcaagtgatctttcaatatcattactaacttcttccactttttccagaatttgaatattaacgctaaaggtgtaagacttcagatttcaaattaatctttctatattttttaaatttacagaatattatataacccactgctgaaaaagaaaaaaatgattgttttagaagttaaagtcaatattgattttaaatataagtaatgaaggcatatttccaataactagtgatatggcatcgttgcattttacagtatcttcaaaaatacagaatttatagaataatttctcctcatttaatatttttcaaaatcaaagttatggtttcctcattttactaaaatcgtattctaattcttcattatagtaaatctatgagcaactccttacttcggttcctctgatttcaaggccatattttaaaaaatcaaaaggcactgtgaactattttgaagaaaacacaacattttaatacagattgaaaggacctcttctgaagctagaaacaatctatagttatacatcttcattaatactgtgttaccttttaaaatagtaattttttacattttcctgtgtaaacctaattgtggtagaaatttttaccaactctatactcaatcaagcaaaatttctgtatattccctgtggaatgtacctatgtgagtttcagaaattctcaaaatacgtgttcaaaaatttctgcttttgcatctttgggacacctcagaaaacttattaacaactgtgaatatgagaaatacagaagaaaataataagccctctatacataaatgcccagcacaattcattgttaaaaaacaaccaaacctcacactactgtatttcattatctgtactgaaagcaaatgctttgtgactattaaatgttgcacatcattcattcaaaaaaaaaaaaaaaaaaa

SEQ ID NO: 124 - DNA, 9870 bp, Homo sapiens
  modified_base (7138): a, t, c or g
gtaattgcgagcgagagtgagtggggccgggacccgcagagccgagccgacccttctctcccgggctgcggcagggcagggcggggagctccgcgcaccaacagagccggttctcagggcgctttgctccttgttttttccccggttctgttttctccccttctccggaaggcttgtcaaggggtaggagaaagagacgcaaacacaaaagtggaaaacagttaatgaccagccacggcgtccctgctgtgagctctggccgctgccttccagggctcccgagccacacgctgggggtgctggctgagggaacatggcttgttggcctcagctgaggttgctgctgtggaagaacctcactttcagaagaagacaaacatgtcagctgctgctggaagtggcctggcctctatttatcttcctgatcctgatctctgttcggctgagctacccaccctatgaacaacatgaatgccattttccaaataaagccatgccctctgcaggaacacttccttgggttcaggggattatctgtaatgccaacaacccctgtttccgttacccgactcctggggaggctcccggagttgttggaaactttaacaaatccattgtggctcgcctgttctcagatgctcggaggcttcttttatacagccagaaagacaccagcatgaaggacatgcgcaaagttctgagaacattacagcagatcaagaaatccagctcaaacttgaagcttcaagatttcctggtggacaatgaaaccttctctgggttcctgtatcacaacctctctctcccaaagtctactgtggacaagatgctgagggctgatgtcattctccacaaggtatttttgcaaggctaccagttacatttgacaagtctgtgcaatggatcaaaatcagaagagatgattcaacttggtgaccaagaagtttctgagctttgtggcctaccaagggagaaactggctgcagcagagcgagtacttcgttccaacatggacatcctgaagccaatcctgagaacactaaactctacatctcccttcccgagcaaggagctggccgaagccacaaaaacattgctgcatagtcttgggactctggcccaggagctgttcagcatgagaagctggagtgacatgcgacaggaggtgatgtttctgaccaatgtgaacagctccagctcctccacccaaatctaccaggctgtgtctcgtattgtctgcgggcatcccgagggaggggggctgaagatcaagtctctcaactggtatgaggacaacaactacaaagccctctttggaggcaatggcactgaggaagatgctgaaaccttctatgacaactctacaactccttactgcaatgatttgatgaagaatttggagtctagtcctctttcccgcattatctggaaagctctgaagccgctgctcgttgggaagatcctgtatacacctgacactccagccacaaggcaggtcatggctgaggtgaacaagaccttccaggaactggctgtgttccatgatctggaaggcatgtgggaggaactcagccccaagatctggaccttcatggagaacagccaagaaatggaccttgtccggatgctgttggacagcagggacaatgaccacttttgggaacagcagttggatggcttagattggacagcccaagacatcgtggcgtttttggccaagcacccagaggatgtccagtccagtaatggttctgtgtacacctggagagaagctttcaacgagactaaccaggcaatccggaccatatctcgcttcatggagtgtgtcaacctgaacaagctagaacccatagcaacagaagtctggctcatcaacaagtccatggagctgctggatgagaggaagttctgggctggtattgtgttcactggaattactccaggcagcattgagctgccccatcatgtcaagtacaagatccgaatggacattgacaatgtggagaggacaaataaaatcaaggatgggtactgggaccctggtcctcgagctgacccctttgaggacatgcggtacgtctgggggggcttcgcctacttgcaggatgtggtggagcaggcaatcatcagggtgctgacgggcaccgagaagaaaactggtgtctatatgcaacagatgccctatccctgttacgttgatgacatctttctgcgggtgatgagccggtcaatgcccctcttcatgacgctggcctggatttactcagtggctgtgatcatcaagggcatcgtgtatgagaaggaggcacggctgaaagagaccatgcggatcatgggcctggacaacagcatcctctggtttagctggttcattagtagcctcattcctcttcttgtgagcgctggcctgctagtggtcatcctgaagttaggaaacctgctgccctacagtgatcccagcgtggtgtttgtcttcctgtccgtgtttgctgtggtgacaatcctgcagtgcttcctgattagcacactcttctccagagccaacctggcagcagcctgtgggggcatcatctacttcacgctgtacctgccctacgtcctgtgtgtggcatggcaggactacgtgggcttcacactcaagatcttcgctagcctgctgtctcctgtggcttttgggtttggctgtgagtactttgccctttttgaggagcagggcattggagtgcagtgggacaacctgtttgagagtcctgtggaggaagatggcttcaatctcaccacttcggtctccatgatgctgtttgacaccttcctctatggggtgatgacctggtacattgaggctgtctttccaggccagtacggaattcccaggccctggtattttccttgcaccaagtcctactggtttggcgaggaaagtgatgagaagagccaccctggttccaaccagaagagaatatcagaaatctgcatggaggaggaacccacccacttgaagctgggcgtgtccattcagaacctggtaaaagtctaccgagatgggatgaaggtggctgtcgatggcctggcactgaatttttatgagggccagatcacctccttcctgggccacaatggagcggggaagacgaccaccatgtcaatcctgaccgggttgttccccccgacctcgggcaccgcctacatcctgggaaaagacattcgctctgagatgagcaccatccggcagaacctgggggtctgtccccagcataacgtgctgtttgacatgctgactgtcgaagaacacatctggttctatgcccgcttgaaagggctctctgagaagcacgtgaaggcggagatggagcagatggccctggatgttggtttgccatcaagcaagctgaaaagcaaaacaagccagctgtcaggtggaatgcagagaaagctatctgtggccttggcctttgtcgggggatctaaggttgtcattctggatgaacccacagctggtgtggacccttactcccgcaggggaatatgggagctgctgctgaaataccgacaaggccgcaccattattctctctacacaccacatggatgaagcggacgtcctgggggacaggattgccatcatctcccatgggaagctgtgctgtgtgggctcctccctgtttctgaagaaccagctgggaacaggctactacctgaccttggtcaagaaagatgtggaatcctccctcagttcctgcagaaacagtagtagcactgtgtcatacctgaaaaaggaggacagtgtttctcagagcagttctgatgctggcctgggcagcgaccatgagagtgacacgctgaccatcgatgtctctgctatctccaacctcatcaggaagcatgtgtctgaagcccggctggtggaagacatagggcatgagctgacctatgtgctgccatatgaagctgctaaggagggagcctttgtggaactctttcatgagattgatgaccggctctcagacctgggcatttctagttatggcatctcagagacgaccctggaagaaatattcctcaaggtggccgaagagagtggggtggatgctgagacctcagatggtaccttgccagcaagacgaaacaggcgggccttcggggacaagcagagctgtcttcgcccgttcactgaagatgatgctgctgatccaaatgattctgacatagacccagaatccagagagacagacttgctcagtgggatggatggcaaagggtcctaccaggtgaaaggctggaaacttacacagcaacagtttgtggcccttttgtggaagagactgctaattgccagacggagtcggaaaggattttttgctcagattgtcttgccagctgtgtttgtctgcattgcccttgtgttcagcctgatcgtgccaccctttggcaagtaccccagcctggaacttcagccctggatgtacaacgaacagtacacatttgtcagcaatgatgctcctgaggacacgggaaccctggaactcttaaacgccctcaccaaagaccctggcttcgggacccgctgtatggaaggaaacccaatcccagacacgccctgccaggcaggggaggaagagtggaccactgccccagttccccagaccatcatggacctcttccagaatgggaactggacaatgcagaacccttcacctgcatgccagtgtagcagcgacaaaatcaagaagatgctgcctgtgtgtcccccaggggcaggggggctgcctcctccacaaagaaaacaaaacactgcagatatccttcaggacctgacaggaagaaacatttcggattatctggtgaagacgtatgtgcagatcatagccaaaagcttaaagaacaagatctgggtgaatgagtttaggtatggcggcttttccctgggtgtcagtaatactcaagcacttcctccgagtcaagaagttaatgatgccaccaaacaaatgaagaaacacctaaagctggccaaggacagttctgcagatcgatttctcaacagcttgggaagatttatgacaggactggacaccagaaataatgtcaaggtgtggttcaataacaagggctggcatgcaatcagctctttcctgaatgtcatcaacaatgccattctccgggccaacctgcaaaagggagagaaccctagccattatggaattactgctttcaatcatcccctgaatctcaccaagcagcagctctcagaggtggctccgatgaccacatcagtggatgtccttgtgtccatctgtgtcatctttgcaatgtccttcgtcccagccagctttgtcgtattcctgatccaggagcgggtcagcaaagcaaaacacctgcagttcatcagtggagtgaagcctgtcatctactggctctctaattttgtctgggatatgtgcaattacgttgtccctgccacactggtcattatcatcttcatctgcttccagcagaagtcctatgtgtcctccaccaatctgcctgtgctagcccttctacttttgctgtatgggtggtcaatcacacctctcatgtacccagcctcctttgtgttcaagatccccagcacagcctatgtggtgctcaccagcgtgaacctcttcattggcattaatggcagcgtggccacctttgtgctggagctgttcaccgacaataagctgaataatatcaatgatatcctgaagtccgtgttcttgatcttcccacatttttgcctgggacgagggctcatcgacatggtgaaaaaccaggcaatggctgatgccctggaaaggtttggggagaatcgctttgtgtcaccattatcttgggacttggtgggacgaaacctcttcgccatggccgtggaaggggtggtgttcttcctcattactgttctgatccagtacagattcttcatcaggcccagacctgtaaatgcaaagctatctcctctgaatgatgaagatgaagatgtgaggcgggaaagacagagaattcttgatggtggaggccagaatgacatcttagaaatcaaggagttgacgaagatatatagaaggaagcggaagcctgctgttgacaggatttgcgtgggcattcctcctggtgagtgctttgggctcctgggagttaatggggctggaaaatcatcaactttcaagatgttaacaggagataccactgttaccagaggagatgctttccttaacagaaatagtatcttatcaaacatccatgaagtacatcagaacatgggctactgccctcagtttgatgccatcacagagctgttgactgggagagaacacgtggagttctttgcccttttgagaggagtcccagagaaagaagttggcaaggttggtgagtgggcgattcggaaactgggcctcgtgaagtatggagaaaaatatgctggtaactatagtggaggcaacaaacgcaagctctctacagccatggctttgatcggcgggcctcctgtggtgtttctggatgaacccaccacaggcatggatcccaaagcccggcggttcttgtggaattgtgccctaagtgttgtcaaggaggggagatcagtagtgcttacatctcatagtatggaagaatgtgaagctctttgcactaggatggcaatcatggtcaatggaaggttcaggtgccttggcagtgtccagcatctaaaaaataggtttggagatggttatacaatagttgtacgaatagcagggtccaacccggacctgaagcctgtccaggatttctttggacttgcatttcctggaagtgttccaaaagagaaacaccggaacatgctacaataccagcttccatcttcattatcttctctggccaggatattcagcatcctctcccagagcaaaaagcgactccacatagaagactactctgtttctcagacaacacttgaccaagtatttgtgaactttgccaaggaccaaagtgatgatgaccacttaaaagacctctcattacacaaaaaccagacagtagtggacgttgcagttctcacatcttttctacaggatgagaaagtgaaagaaagctatgtatgaagaatcctgttcatacggggtggctgaaagtaaagaggnactagactttcctttgcaccatgtgaagtgttgtggagaaaagagccagaagttgatgtgggaagaagtaaactggatactgtactgatactattcaatgcaatgcaattcaatgcaatgaaaacaaaattccattacaggggcagtgcctttgtagcctatgtcttgtatggctctcaagtgaaagacttgaatttagttttttacctatacctatgtgaaactctattatggaacccaatggacatatgggtttgaactcacactttttttttttttttgttcctgtgtattctcattggggttgcaacaataattcatcaagtaatcatggccagcgattattgatcaaaatcaaaaggtaatgcacatcctcattcactaagccatgccatgcccaggagactggtttcccggtgacacatccattgctggcaatgagtgtgccagagttattagtgccaagtttttcagaaagtttgaagcaccatggtgtgtcatgctcacttttgtgaaagctgctctgctcagagtctatcaacattgaatatcagttgacagaatggtgccatgcgtggctaacatcctgctttgattccctctgataagctgttctggtggcagtaacatgcaacaaaaatgtgggtgtctctaggcacgggaaacttggttccattgttatattgtcctatgcttcgagccatgggtctacagggtcatccttatgagactcttaaatatacttagatcctggtaagaggcaaagaatcaacagccaaactgctggggctgcaagctgctgaagccagggcatgggattaaagagattgtgcgttcaaacctagggaagcctgtgcccatttgtcctgactgtctgctaacatggtacactgcatctcaagatgtttatctgacacaagtgtattatttctggctttttgaattaatctagaaaatgaaaagatggagttgtattttgacaaaaatgtttgtactttttaatgttatttggaattttaagttctatcagtgacttctgaatccttagaatggcctctttgtagaaccctgtggtatagaggagtatggccactgccccactatttttattttcttatgtaagtttgcatatcagtcatgactagtgcctagaaagcaatgtgatggtcaggatctcatgacattatatttgagtttctttcagatcatttaggatactcttaatctcacttcatcaatcaaatattttttgagtgtatgctgtagctgaaagagtatgtacgtacgtataagactagagagatattaagtctcagtacacttcctgtgccatgttattcagctcactggtttacaaatataggttgtcttgtggttgtaggagcccactgtaacaatactgggcagcctttttttttttttttaattgcaacaatgcaaaagccaagaaagtataagggtcacaagtctaaacaatgaattcttcaacagggaaaacagctagcttgaaaacttgctgaaaaacacaacttgtgtttatggcatttagtaccttcaaataattggctttgcagatattggataccccattaaatctgacagtctcaaatttttcatctcttcaatcactagtcaagaaaaatataaaaacaacaaatacttccatatggagcatttttcagagttttctaacccagtcttatttttctagtcagtaaacatttgtaaaaatactgtttcactaatacttactgttaactgtcttgagagaaaagaaaaatatgagagaactattgtttggggaagttcaagtgatctttcaatatcattactaacttcttccactttttccaaaatttgaatattaatgctaaaggtgtaagacttcagatttcaaattaatctttctatattttttaaatttacagaatattatataacccactgctgaaaaagaaaaaaatgattgttttagaagttaaagtcaatattgattttaaatataagtaatgaaggcatatttccaataactagtgatatggcatcgttgcattttacagtatcttcaaaaatacagaatttatagaataatttctcctcatttaatatttttcaaaatcaaagttatggtttcctcattttactaaaatcgtattctaattcttcattatagtaaatctatgagcaactccttacttcggttcctctgatttcaaggccatattttaaaaaatcaaaaggcactgtgaactattttgaagaaaacacaacattttaatacagattgaaaggacctcttctgaagctagaaacaatctatagttatacatcttcattaatactgtgttaccttttaaaatagtaattttttacattttcctgtgtaaacctaattgtggtagaaatttttaccaactctatactcaatcaagcaaaatttctgtatattccctgtggaatgtacctatgtgagtttcagaaattctcaaaatacgtgttcaaaaatttctgcttttgcatctttgggacacctcagaaaacttattaacaactgtgaatatgagaaatacagaagaaaataataagccctctatacataaatgcccagcacaattcattgttaaaaaacaaccaaacctcacactactgtatttcattatctgtactgaaagcaaatgctttgtgactattaaatgttgcacatcattcattcaaaaaaaaaaaaaaaaaaa

SEQ ID NO: 125 - DNA, 9870 bp, Homo sapiens; identical to SEQ ID NO: 93
  modified_base (7138): a, t, c or g

SEQ ID NO: 126 - DNA, 9870 bp, Homo sapiens
  modified_base (7138): a, t, c or g
gtaattgcgagcgagagtgagtggggccgggacccgcagagccgagccgacccttctctcccgggctgcggcagggcagggcggggagctccgcgcaccaacagagccggttctcagggcgctttgctccttgttttttccccggttctgttttctccccttctccggaaggcttgtcaaggggtaggagaaagagacgcaaacacaaaagtggaaaacagttaatgaccagccacggcgtccctgctgtgagctctggccgctgccttccagggctcccgagccacacgctgggggtgctggctgagggaacatggcttgttggcctcagctgaggttgctgctgtggaagaacctcactttcagaagaagacaaacatgtcagctgctgctggaagtggcctggcctctatttatcttcctgatcctgatctctgttcggctgagctacccaccctatgaacaacatgaatgccattttccaaataaagccatgccctctgcaggaacacttccttgggttcaggggattatctgtaatgccaacaacccctgtttccgttacccgactcctggggaggctcccggagttgttggaaactttaacaaatccattgtggctcgcctgttctcagatgctcggaggcttcttttatacagccagaaagacaccagcatgaaggacatgcgcaaagttctgagaacattacagcagatcaagaaatccagctcaaacttgaagcttcaagatttcctggtggacaatgaaaccttctctgggttcctgtatcacaacctctctctcccaaagtctactgtggacaagatgctgagggctgatgtcattctccacaaggtatttttgcaaggctaccagttacatttgacaagtctgtgcaatggatcaaaatcagaagagatgattcaacttggtgaccaagaagtttctgagctttgtggcctaccaagggagaaactggctgcagcagagcgagtacttcgttccaacatggacatcctgaagccaatcctgagaacactaaactctacatctcccttcccgagcaaggagctggccgaagccacaaaaacattgctgcatagtcttgggactctggcccaggagctgttcagcatgagaagctggagtgacatgcgacaggaggtgatgtttctgaccaatgtgaacagctccagctcctccacccaaatctaccaggctgtgtctcgtattgtctgcgggcatcccgagggaggggggctgaagatcaagtctctcaactggtatgaggacaacaactacaaagccctctttggaggcaatggcactgaggaagatgctgaaaccttctatgacaactctacaactccttactgcaatgatttgatgaagaatttggagtctagtcctctttcccgcattatctggaaagctctgaagccgctgctcgttgggaagatcctgtatacacctgacactccagccacaaggcaggtcatggctgaggtgaacaagaccttccaggaactggctgtgttccatgatctggaaggcatgtgggaggaactcagccccaagatctggaccttcatggagaacagccaagaaatggaccttgtccggatgctgttggacagcagggacaatgaccacttttgggaacagcagttggatggcttagattggacagcccaagacatcgtggcgtttttggccaagcacccagaggatgtccagtccagtaatggttctgtgtacacctggagagaagctttcaacgagactaaccaggcaatccggaccatatctcgcttcatggagtgtgtcaacctgaacaagctagaacccatagcaacagaagtctggctcatcaacaagtccatggagctgctggatgagaggaagttctgggctggtattgtgttcactggaattactccaggcagcattgagctgccccatcatgtcaagtacaagatccgaatggacattgacaatgtggagaggacaaataaaatcaaggatgggtactgggaccctggtcctcgagctgacccctttgaggacatgcggtacgtctgggggggcttcgcctacttgcaggatgtggtggagcaggcaatcatcagggtgctgacgggcaccgagaagaaaactggtgtctatatgcaacagatgccctatccctgttacgttgatgacatctttctgcgggtgatgagccggtcaatgcccctcttcatgacgctggcctggatttactcagtggctgtgatcatcaagggcatcgtgtatgagaaggaggcacggctgaaagagaccatgcggatcatgggcctggacaacagcatcctctggtttagctggttcattagtagcctcattcctcttcttgtgagcgctggcctgctagtggtcatcctgaagttaggaaacctgctgccctacagtgatcccagcgtggtgtttgtcttcctgtccgtgtttgctgtggtgacaatcctgcagtgcttcctgattagcacactcttctccagagccaacctggcagcagcctgtgggggcatcatctacttcacgctgtacctgccctacgtcctgtgtgtggcatggcaggactacgtgggcttcacactcaagatcttcgctagcctgctgtctcctgtggcttttgggtttggctgtgagtactttgccctttttgaggagcagggcattggagtgcagtgggacaacctgtttgagagtcctgtggaggaagatggcttcaatctcaccacttcggtctccatgatgctgtttgacaccttcctctatggggtgatgacctggtacattgaggctgtctttccaggccagtacggaattcccaggccctggtattttccttgcaccaagtcctactggtttggcgaggaaagtgatgagaagagccaccctggttccaaccagaagagaatatcagaaatctgcatggaggaggaacccacccacttgaagctgggcgtgtccattcagaacctggtaaaagtctaccgagatgggatgaaggtggctgtcgatggcctggcactgaatttttatgagggccagatcacctccttcctgggccacaatggagcggggaagacgaccaccatgtcaatcctgaccgggttgttccccccgacctcgggcaccgcctacatcctgggaaaagacattcgctctgagatgagcaccatccggcagaacctgggggtctgtccccagcataacgtgctgtttgacatgctgactgtcgaagaacacatctggttctatgcccgcttgaaagggctctctgagaagcacgtgaaggcggagatggagcagatggccctggatgttggtttgccatcaagcaagctgaaaagcaaaacaagccagctgtcaggtggaatgcagagaaagctatctgtggccttggcctttgtcgggggatctaaggttgtcattctggatgaacccacagctggtgtggacccttactcccgcaggggaatatgggagctgctgctgaaataccgacaaggccgcaccattattctctctacacaccacatggatgaagcggacgtcctgggggacaggattgccatcatctcccatgggaagctgtgctgtgtgggctcctccctgtttctgaagaaccagctgggaacaggctactacctgaccttggtcaagaaagatgtggaatcctccctcagttcctgcagaaacagtagtagcactgtgtcatacctgaaaaaggaggacagtgtttctcagagcagttctgatgctggcctgggcagcgaccatgagagtgacacgctgaccatcgatgtctctgctatctccaacctcatcaggaagcatgtgtctgaagcccggctggtggaagacatagggcatgagctgacctatgtgctgccatatgaagctgctaaggagggagcctttgtggaactctttcatgagattgatgaccggctctcagacctgggcatttctagttatggcatctcagagacgaccctggaagaaatattcctcaaggtggccgaagagagtggggtggatgctgagacctcagatggtaccttgccagcaagacgaaacaggcgggccttcggggacaagcagagctgtcttcgcccgttcactgaagatgatgctgctgatccaaatgattctgacatagacccagaatccagagagacagacttgctcagtgggatggatggcaaagggtcctaccaggtgaaaggctggaaacttacacagcaacagtttgtggcccttttgtggaagagactgctaattgccagacggagtcggaaaggattttttgctcagattgtcttgccagctgtgtttgtctgcattgcccttgtgttcagcctgatcgtgccaccctttggcaagtaccccagcctggaacttcagccctggatgtacaacgaacagtacacatttgtcagcaatgatgctcctgaggacacgggaaccctggaactcttaaacgccctcaccaaagaccctggcttcgggacccgctgtatggaaggaaacccaatcccagacacgccctgccaggcaggggaggaagagtggaccactgccccagttccccagaccatcatggacctcttccagaatgggaactggacaatgcagaacccttcacctgcatgccagtgtagcagcgacaaaatcaagaagatgctgcctgtgtgtcccccaggggcaggggggctgcctcctccacaaagaaaacaaaacactgcagatatccttcaggacctgacaggaagaaacatttcggattatctggtgaagacgtatgtgcagatcatagccaaaagcttaaagaacaagatctgggtgaatgagtttaggtatggcggcttttccctgggtgtcagtaatactcaagcacttcctccgagtcaagaagttaatgatgccaccaaacaaatgaagaaacacctaaagctggccaaggacagttctgcagatcgatttctcaacagcttgggaagatttatgacaggactggacaccagaaataatgtcaaggtgtggttcaataacaagggctggcatgcaatcagctctttcctgaatgtcatcaacaatgccattctccgggccaacctgcaaaagggagagaaccctagccattatggaattactgctttcaatcatcccctgaatctcaccaagcagcagctctcagaggtggctccgatgaccacatcagtggatgtccttgtgtccatctgtgtcatctttgcaatgtccttcgtcccagccagctttgtcgtattcctgatccaggagcgggtcagcaaagcaaaacacctgcagttcatcagtggagtgaagcctgtcatctactggctctctaattttgtctgggatatgtgcaattacgttgtccctgccacactggtcattatcatcttcatctgcttccagcagaagtcctatgtgtcctccaccaatctgcctgtgctagcccttctacttttgctgtatgggtggtcaatcacacctctcatgtacccagcctcctttgtgttcaagatccccagcacagcctatgtggtgctcaccagcgtgaacctcttcattggcattaatggcagcgtggccacctttgtgctggagctgttcaccgacaataagctgaataatatcaatgatatcctgaagtccgtgttcttgatcttcccacatttttgcctgggacgagggctcatcgacatggtgaaaaaccaggcaatggctgatgccctggaaaggtttggggagaatcgctttgtgtcaccattatcttgggacttggtgggacgaaacctcttcgccatggccgtggaaggggtggtgttcttcctcattactgttctgatccagtacagattcttcatcaggcccagacctgtaaatgcaaagctatctcctctgaatgatgaagatgaagatgtgaggcgggaaagacagagaattcttgatggtggaggccagaatgacatcttagaaatcaaggagttgacgaagatatatagaaggaagcggaagcctgctgttgacaggatttgcgtgggcattcctcctggtgagtgctttgggctcctgggagttaatggggctggaaaatcatcaactttcaagatgttaacaggagataccactgttaccagaggagatgctttccttaacagaaatagtatcttatcaaacatccatgaagtacatcagaacatgggctactgccctcagtttgatgccatcacagagctgttgactgggagagaacacgtggagttctttgcccttttgagaggagtcccagagaaagaagttggcaaggttggtgagtgggcgattcggaaactgggcctcgtgaagtatggagaaaaatatgctggtaactatagtggaggcaacaaacgcaagctctctacagccatggctttgatcggcgggcctcctgtggtgtttctggatgaacccaccacaggcatggatcccaaagcccggcggttcttgtggaattgtgccctaagtgttgtcaaggaggggagatcagtagtgcttacatctcatagtatggaagaatgtgaagctctttgcactaggatggcaatcatggtcaatggaaggttcaggtgccttggcagtgtccagcatctaaaaaataggtttggagatggttatacaatagttgtacgaatagcagggtccaacccggacctgaagcctgtccaggatttctttggacttgcatttcctggaagtgttccaaaagagaaacaccggaacatgctacaataccagcttccatcttcattatcttctctggccaggatattcagcatcctctcccagagcaaaaagcgactccacatagaagactactctgtttctcagacaacacttgaccaagtatttgtgaactttgccaaggaccaaagtgatgatgaccacttaaaagacctctcattacacaaaaaccagacagtagtggacgttgcagttctcacatcttttctacaggatgagaaagtgaaagaaagctatgtatgaagaatcctgttcatacggggtggctgaaagtaaagaggnactagactttcctttgcaccatgtgaagtgttgtggagaaaagagccagaagttgatgtgggaagaagtaaactggatactgtactgatactattcaatgcaatgcaattcaatgcaatgaaaacaaaattccattacaggggcagtgcctttgtagcctatgtcttgtatggctctcaagtgaaagacttgaatttagttttttacctatacctatgtgaaactctattatggaacccaatggacatatgggtttgaactcacactttttttttttttttgttcctgtgtattctcattggggttgcaacaataattcatcaagtaatcatggccagcgattattgatcaaaatcaaaaggtaatgcacatcctcattcactaagccatgccatgcccaggagactggtttcccggtgacacatccattgctggcaatgagtgtgccagagttattagtgccaagtttttcagaaagtttgaagcaccatggtgtgtcatgctcacttttgtgaaagctgctctgctcagagtctatcaacattgaatatcagttgacagaatggtgccatgcgtggctaacatcctgctttgattccctctgataagctgttctggtggcagtaacatgcaacaaaaatgtgggtgtctctaggcacgggaaacttggttccattgttatattgtcctatgcttcgagccatgggtctacagggtcatccttatgagactcttaaatatacttagatcctggtaagaggcaaagaatcaacagccaaactgctggggctgcaagctgctgaagccagggcatgggattaaagagattgtgcgttcaaacctagggaagcctgtgcccatttgtcctgactgtctgctaacatggtacactgcatctcaagatgtttatctgacacaagtgtattatttctggctttttgaattaatctagaaaatgaaaagatggagttgtattttgacaaaaatgtttgtactttttaatgttatttggaattttaagttctatcagtgacttctgaatccttagaatggcctctttgtagaaccctgtggtatagaggagtatggccactgccccactatttttattttcttatgtaagtttgcatatcagtcatgactagtgcctagaaagcaatgtgatggtcaggatctcatgacattatatttgagtttctttcagatcatttaggatactcttaatctcacttcatcaatcaaatattttttgagtgtatgctgtagctgaaagagtatgtacgtacgtataagactagagagatattaagtctcagtacacttcctgtgccatgttattcagctcactggtttacaaatataggttgtcttgtggttgtaggagcccactgtaacaatactgggcagcctttttttttttttttaattgcaacaatgcaaaagccaagaaagtataagggtcacaagtctaaacaatgaattcttcaacagggaaaacagctagcttgaaaacttgctgaaaaacacaacttgtgtttatggcatttagtaccttcaaataattggctttgcagatattggataccccattaaatctgacagtctcaaatttttcatctcttcaatcactagtcaagaaaaatataaaaacaacaaatacttccatatggagcatttttcagagttttctaacccagtcttatttttctagtcagtaaacatttgtaaaaatactgtttcactaatacttactgttaactgtcttgagagaaaagaaaaatatgagagaactattgtttggggaagttcaagtgatctttcaatatcattactaacttcttccactttttccaaaatttgaatattaacgctaaaggtgtaagacttcagatttcaaattaatctttctatattttttaaatttacagaatattatataacccactgctgaaaaagaaaaaaatgattgttttagaagttaaagtcaatattgattttaaatataagtaatgaaggcatatttccaataactagtgatatggcatcgttgcattttacagtatcttcaaaaatacagaatttatagaataatttctcctcatttaatatttttcaaaatcaaagttatggtttcctcattttactaaaatcgtattctaattcttcattatagtaaatctatgagcaactccttacttcggttcctctgatttcaaggccatattttaaaaaatcaaaaggcactgtgaactattttgaagaaaacacaacattttaatacagattgaaaggacctcttctgaagctagaaacaatctatagttatacatcttcattaatactgtgttaccttttaaaatagtaattttttacattttcctgtgtaaacctaattgtggtagaaatttttaccaactctatactcaatcaagcaaaatttctgtatattccctgtggaatgtacctatgtgagtttcagaaattctcaaaatacgtgttcaaaaatttctgcttttgcatctttgggacacctcagaaaacttattaacaactgtgaatatgagaaatacagaagaaaataataagccctctatacataaatgcccagcacaattcattgttaaaaaacaaccaaacctcacactactgtatttcattatctatactgaaagcaaatgctttgtgactattaaatgttgcacatcattcattcaaaaaaaaaaaaaaaaaaa

SEQ ID NO: 127 - protein, 2261 aa, Homo sapiens
MACWPQLRLLLWKNLTFRRRQTCQLLLEVAWPLFIFLILISVRLSYPPYEQHECHFPNKAMPSAGTLPWVQGIICNANNPCFRYPTPGEAPGVVGNFNKSIVARLFSDARRLLLYSQKDTSMKDMRKVLRTLQQIKKSSSNLKLQDFLVDNETFSGFLYHNLSLPKSTVDKMLRADVILHKVFLQGYQLHLTSLCNGSKSEEMIQLGDQEVSELCGLPKEKLAAAERVLRSNMDILKPILRTLNSTSPFPSKELAEATKTLLHSLGTLAQELFSMRSWSDMRQEVMFLTNVNSSSSSTQIYQAVSRIVCGHPEGGGLKIKSLNWYEDNNYKALFGGNGTEEDAETFYDNSTTPYCNDLMKNLESSPLSRIIWKALKPLLVGKILYTPDTPATRQVMAEVNKTFQELAVFHDLEGMWEELSPKIWTFMENSQEMDLVRMLLDSRDNDHFWEQQLDGLDWTAQDIVAFLAKHPEDVQSSNGSVYTWREAFNETNQAIRTISRFMECVNLNKLEPIATEVWLINKSMELLDERKFWAGIVFTGITPGSIELPHHVKYKIRMDIDNVERTNKIKDGYWDPGPRADPFEDMRYVWGGFAYLQDVVEQAIIRVLTGTEKKTGVYMQQMPYPCYVDDIFLRVMSRSMPLFMTLAWIYSVAVIIKGIVYEKEARLKETMRIMGLDNSILWFSWFISSLIPLLVSAGLLVVILKLGNLLPYSDPSVVFVFLSVFAVVTILQCFLISTLFSRANLAAACGGIIYFTLYLPYVLCVAWQDYVGFTLKIFASLLSPVAFGFGCEYFALFEEQGIGVQWDNLFESPVEEDGFNLTTSVSMMLFDTFLYGVMTWYIEAVFPGQYGIPRPWYFPCTKSYWFGEESDEKSHPGSNQKRISEICMEEEPTHLKLGVSIQNLVKVYRDGMKVAVDGLALNFYEGQITSFLGHNGAGKTTTMSILTGLFPPTSGTAYILGKDIRSEMSTIRQNLGVCPQHNVLFDMLTVEEHIWFYARLKGLSEKHVKAEMEQMALDVGLPSSKLKSKTSQLSGGMQRKLSVALAFVGGSKVVILDEPTAGVDPYSRRGIWELLLKYRQGRTIILSTHHMDEADVLGDRIAIISHGKLCCVGSSLFLKNQLGTGYYLTLVKKDVESSLSSCRNSSSTVSYLKKEDSVSQSSSDAGLGSDHESDTLTIDVSAISNLIRKHVSEARLVEDIGHELTYVLPYEAAKEGAFVELFHEIDDRLSDLGISSYGISETTLEEIFLKVAEESGVDAETSDGTLPARRNRRAFGDKQSCLRPFTEDDAADPNDSDIDPESRETDLLSGMDGKGSYQVKGWKLTQQQFVALLWKRLLIARRSRKGFFAQIVLPAVFVCIALVFSLIVPPFGKYPSLELQPWMYNEQYTFVSNDAPEDTGTLELLNALTKDPGFGTRCMEGNPIPDTPCQAGEEEWTTAPVPQTIMDLFQNGNWTMQNPSPACQCSSDKIKKMLPVCPPGAGGLPPPQRKQNTADILQDLTGRNISDYLVKTYVQIIAKSLKNKIWVNEFRYGGFSLGVSNTQALPPSQEVNDATKQMKKHLKLAKDSSADRFLNSLGRFMTGLDTRNNVKVWFNNKGWHAISSFLNVINNAILRANLQKGENPSHYGITAFNHPLNLTKQQLSEVAPMTTSVDVLVSICVIFAMSFVPASFVVFLIQERVSKAKHLQFISGVKPVIYWLSNFVWDMCNYVVPATLVIIIFICFQQKSYVSSTNLPVLALLLLLYGWSITPLMYPASFVFKIPSTAYVVLTSVNLFIGINGSVATFVLELFTDNKLNNINDILKSVFLIFPHFCLGRGLIDMVKNQAMADALERFGENRFVSPLSWDLVGRNLFAMAVEGVVFFLITVLIQYRFFIRPRPVNAKLSPLNDEDEDVRRERQRILDGGGQNDILEIKELTKIYRRKRKPAVDRICVGIPPGECFGLLGVNGAGKSSTFKMLTGDTTVTRGDAFLNRNSILSNIHEVHQNMGYCPQFDAITELLTGREHVEFFALLRGVPEKEVGKVGEWAIRKLGLVKYGEKYAGNYSGGNKRKLSTAMALIGGPPVVFLDEPTTGMDPKARRFLWNCALSVVKEGRSVVLTSHSMEECEALCTRMAIMVNGRFRCLGSVQHLKNRFGDGYTIVVRIAGSNPDLKPVQDFFGLAFPGSVPKEKHRNMLQYQLPSSLSSLARIFSILSQSKKRLHIEDYSVSQTTLDQVFVNFAKDQSDDDHLKDLSLHKNQTVVDVAVLTSFLQDEKVKESYV

SEQ ID NO: 128 - protein, 2261 aa, Homo sapiens
MACWPQLRLLLWKNLTFRRRQTCQLLLEVAWPLFIFLILISVRLSYPPYEQHECHFPNKAMPSAGTLPWVQGIICNANNPCFRYPTPGEAPGVVGNFNKSIVARLFSDARRLLLYSQKDTSMKDMRKVLRTLQQIKKSSSNLKLQDFLVDNETFSGFLYHNLSLPKSTVDKMLRADVILHKVFLQGYQLHLTSLCNGSKSEEMIQLGDQEVSELCGLPREKLAAAERVLRSNMDILKPILRTLNSTSPFPSKELAEATKTLLHSLGTLAQELFSMRSWSDMRQEVMFLTNVNSSSSSTQIYQAVSRIVCGHPEGGGLKIKSLNWYEDNNYKALFGGNGTEEDAETFYDNSTTPYCNDLMKNLESSPLSRIIWKALKPLLVGKILYTPDTPATRQVMAEVNKTFQELAVFHDLEGMWEELSPKIWTFMENSQEMDLVRMLLDSRDNDHFWEQQLDGLDWTAQDIVAFLAKHPEDVQSSNGSVYTWREAFNETNQAIRTISRFMECVNLNKLEPIATEVWLINKSMELLDERKFWAGIVFTGITPGSIELPHHVKYKIRMDIDNVERTNKIKDGYWDPGPRADPFEDMRYVWGGFAYLQDVVEQAIIRVLTGTEKKTGVYMQQMPYPCYVDDIFLRVMSRSMPLFMTLAWIYSVAVIIKGIVYEKEARLKETMRIMGLDNSILWFSWFISSLIPLLVSAGLLVVILKLGNLLPYSDPSVVFVFLSVFAVVTILQCFLISTLFSRANLAAACGGIIYFTLYLPYVLCVAWQDYMGFTLKIFASLLSPVAFGFGCEYFALFEEQGIGVQWDNLFESPVEEDGFNLTTSVSMMLFDTFLYGVMTWYIEAVFPGQYGIPRPWYFPCTKSYWFGEESDEKSHPGSNQKRISEICMEEEPTHLKLGVSIQNLVKVYRDGMKVAVDGLALNFYEGQITSFLGHNGAGKTTTMSILTGLFPPTSGTAYILGKDIRSEMSTIRQNLGVCPQHNVLFDMLTVEEHIWFYARLKGLSEKHVKAEMEQMALDVGLPSSKLKSKTSQLSGGMQRKLSVALAFVGGSKVVILDEPTAGVDPYSRRGIWELLLKYRQGRTIILSTHHMDEADVLGDRIAIISHGKLCCVGSSLFLKNQLGTGYYLTLVKKDVESSLSSCRNSSSTVSYLKKEDSVSQSSSDAGLGSDHESDTLTIDVSAISNLIRKHVSEARLVEDIGHELTYVLPYEAAKEGAFVELFHEIDDRLSDLGISSYGISETTLEEIFLKVAEESGVDAETSDGTLPARRNRRAFGDKQSCLRPFTEDDAADPNDSDIDPESRETDLLSGMDGKGSYQVKGWKLTQQQFVALLWKRLLIARRSRKGFFAQIVLPAVFVCIALVFSLIVPPFGKYPSLELQPWMYNEQYTFVSNDAPEDTGTLELLNALTKDPGFGTRCMEGNPIPDTPCQAGEEEWTTAPVPQTIMDLFQNGNWTMQNPSPACQCSSDKIKKMLPVCPPGAGGLPPPQRKQNTADILQDLTGRNISDYLVKTYVQIIAKSLKNKIWVNEFRYGGFSLGVSNTQALPPSQEVNDATKQMKKHLKLAKDSSADRFLNSLGRFMTGLDTRNNVKVWFNNKGWHAISSFLNVINNAILRANLQKGENPSHYGITAFNHPLNLTKQQLSEVAPMTTSVDVLVSICVIFAMSFVPASFVVFLIQERVSKAKHLQFISGVKPVIYWLSNFVWDMCNYVVPATLVIIIFICFQQKSYVSSTNLPVLALLLLLYGWSITPLMYPASFVFKIPSTAYVVLTSVNLFIGINGSVATFVLELFTDNKLNNINDILKSVFLIFPHFCLGRGLIDMVKNQAMADALERFGENRFVSPLSWDLVGRNLFAMAVEGVVFFLITVLIQYRFFIRPRPVNAKLSPLNDEDEDVRRERQRILDGGGQNDILEIKELTKIYRRKRKPAVDRICVGIPPGECFGLLGVNGAGKSSTFKMLTGDTTVTRGDAFLNRNSILSNIHEVHQNMGYCPQFDAITELLTGREHVEFFALLRGVPEKEVGKVGEWAIRKLGLVKYGEKYAGNYSGGNKRKLSTAMALIGGPPVVFLDEPTTGMDPKARRFLWNCALSVVKEGRSVVLTSHSMEECEALCTRMAIMVNGRFRCLGSVQHLKNRFGDGYTIVVRIAGSNPDLKPVQDFFGLAFPGSVPKEKHRNMLQYQLPSSLSSLARIFSILSQSKKRLHIEDYSVSQTTLDQVFVNFAKDQSDDDHLKDLSLHKNQTVVDVAVLTSFLQDEKVKESYV

SEQ ID NO: 129 - protein, 2261 aa, Homo sapiens
MACWPQLRLLLWKNLTFRRRQTCQLLLEVAWPLFIFLILISVRLSYPPYEQHECHFPNKAMPSAGTLPWVQGIICNANNPCFRYPTPGEAPGVVGNFNKSIVARLFSDARRLLLYSQKDTSMKDMRKVLRTLQQIKKSSSNLKLQDFLVDNETFSGFLYHNLSLPKSTVDKMLRADVILHKVFLQGYQLHLTSLCNGSKSEEMIQLGDQEVSELCGLPREKLAAAERVLRSNMDILKPILRTLNSTSPFPSKELAEATKTLLHSLGTLAQELFSMRSWSDMRQEVMFLTNVNSSSSSTQIYQAVSRIVCGHPEGGGLKIKSLNWYEDNNYKALFGGNGTEEDAETFYDNSTTPYCNDLMKNLESSPLSRIIWKALKPLLVGKILYTPDTPATRQVMAEVNKTFQELAVFHDLEGMWEELSPKIWTFMENSQEMDLVRMLLDSRDNDHFWEQQLDGLDWTAQDIVAFLAKHPEDVQSSNGSVYTWREAFNETNQAIRTISRFMECVNLNKLEPIATEVWLINKSMELLDERKFWAGIVFTGITPGSIELPHHVKYKIRMDIDNVERTNKIKDGYWDPGPRADPFEDMRYVWGGFAYLQDVVEQAIIRVLTGTEKKTGVYMQQMPYPCYVDDIFLRVMSRSMPLFMTLAWIYSVAVIIKGIVYEKEARLKETMRIMGLDNSILWFSWFISSLIPLLVSAGLLVVILKLGNLLPYSDPSVVFVFLSVFAVVTILQCFLISTLFSRANLAAACGGIIYFTLYLPYVLCVAWQDYVGFTLKIFASLLSPVAFGFGCEYFALFEEQGIGVQWDNLFESPVEEDGFNLTTSISMMLFDTFLYGVMTWYIEAVFPGQYGIPRPWYFPCTKSYWFGEESDEKSHPGSNQKRISEICMEEEPTHLKLGVSIQNLVKVYRDGMKVAVDGLALNFYEGQITSFLGHNGAGKTTTMSILTGLFPPTSGTAYILGKDIRSEMSTIRQNLGVCPQHNVLFDMLTVEEHIWFYARLKGLSEKHVKAEMEQMALDVGLPSSKLKSKTSQLSGGMQRKLSVALAFVGGSKVVILDEPTAGVDPYSRRGIWELLLKYRQGRTIILSTHHMDEADVLGDRIAIISHGKLCCVGSSLFLKNQLGTGYYLTLVKKDVESSLSSCRNSSSTVSYLKKEDSVSQSSSDAGLGSDHESDTLTIDVSAISNLIRKHVSEARLVEDIGHELTYVLPYEAAKEGAFVELFHEIDDRLSDLGISSYGISETTLEEIFLKVAEESGVDAETSDGTLPARRNRRAFGDKQSCLRPFTEDDAADPNDSDIDPESRETDLLSGMDGKGSYQVKGWKLTQQQFVALLWKRLLIARRSRKGFFAQIVLPAVFVCIALVFSLIVPPFGKYPSLELQPWMYNEQYTFVSNDAPEDTGTLELLNALTKDPGFGTRCMEGNPIPDTPCQAGEEEWTTAPVPQTIMDLFQNGNWTMQNPSPACQCSSDKIKKMLPVCPPGAGGLPPPQRKQNTADILQDLTGRNISDYLVKTYVQIIAKSLKNKIWVNEFRYGGFSLGVSNTQALPPSQEVNDATKQMKKHLKLAKDSSADRFLNSLGRFMTGLDTRNNVKVWFNNKGWHAISSFLNVINNAILRANLQKGENPSHYGITAFNHPLNLTKQQLSEVAPMTTSVDVLVSICVIFAMSFVPASFVVFLIQERVSKAKHLQFISGVKPVIYWLSNFVWDMCNYVVPATLVIIIFICFQQKSYVSSTNLPVLALLLLLYGWSITPLMYPASFVFKIPSTAYVVLTSVNLFIGINGSVATFVLELFTDNKLNNINDILKSVFLIFPHFCLGRGLIDMVKNQAMADALERFGENRFVSPLSWDLVGRNLFAMAVEGVVFFLITVLIQYRFFIRPRPVNAKLSPLNDEDEDVRRERQRILDGGGQNDILEIKELTKIYRRKRKPAVDRICVGIPPGECFGLLGVNGAGKSSTFKMLTGDTTVTRGDAFLNRNSILSNIHEVHQNMGYCPQFDAITELLTGREHVEFFALLRGVPEKEVGKVGEWAIRKLGLVKYGEKYAGNYSGGNKRKLSTAMALIGGPPVVFLDEPTTGMDPKARRFLWNCALSVVKEGRSVVLTSHSMEECEALCTRMAIMVNGRFRCLGSVQHLKNRFGDGYTIVVRIAGSNPDLKPVQDFFGLAFPGSVPKEKHRNMLQYQLPSSLSSLARIFSILSQSKKRLHIEDYSVSQTTLDQVFVNFAKDQSDDDHLKDLSLHKNQTVVDVAVLTSFLQDEKVKESYV

SEQ ID NO: 130 - protein, 2261 aa, Homo sapiens
MACWPQLRLLLWKNLTFRRRQTCQLLLEVAWPLFIFLILISVRLSYPPYEQHECHFPNKAMPSAGTLPWVQGIICNANNPCFRYPTPGEAPGVVGNFNKSIVARLFSDARRLLLYSQKDTSMKDMRKVLRTLQQIKKSSSNLKLQDFLVDNETFSGFLYHNLSLPKSTVDKMLRADVILHKVFLQGYQLHLTSLCNGSKSEEMIQLGDQEVSELCGLPREKLAAAERVLRSNMDILKPILRTLNSTSPFPSKELAEATKTLLHSLGTLAQELFSMRSWSDMRQEVMFLTNVNSSSSSTQIYQAVSRIVCGHPEGGGLKIKSLNWYEDNNYKALFGGNGTEEDAETFYDNSTTPYCNDLMKNLESSPLSRIIWKALKPLLVGKILYTPDTPATRQVMAEVNKTFQELAVFHDLEGMWEELSPKIWTFMENSQEMDLVRMLLDSRDNDHFWEQQLDGLDWTAQDIVAFLAKHPEDVQSSNGSVYTWREAFNETNQAIRTISRFMECVNLNKLEPIATEVWLINKSMELLDERKFWAGIVFTGITPGSIELPHHVKYKIRMDIDNVERTNKIKDGYWDPGPRADPFEDMRYVWGGFAYLQDVVEQAIIRVLTGTEKKTGVYMQQMPYPCYVDDIFLRVMSRSMPLFMTLAWIYSVAVIIKGIVYEKEARLKETMRIMGLDNSILWFSWFISSLIPLLVSAGLLVVILKLGNLLPYSDPSVVFVFLSVFAVVTILQCFLISTLFSRANLAAACGGIIYFTLYLPYVLCVAWQDYVGFTLKIFASLLSPVAFGFGCEYFALFEEQGIGVQWDNLFESPVEEDGFNLTTSVSMMLFDTFLYGVMTWYIEAVFPGQYGIPRPWPFPCTKSYWFGEESDEKSHPGSNQKRISEICMEEEPTHLKLGVSIQNLVKVYRDGMKVAVDGLALNFYEGQITSFLGHNGAGKTTTMSILTGLFPPTSGTAYILGKDIRSEMSTIRQNLGVCPQHNVLFDMLTVEEHIWFYARLKGLSEKHVKAEMEQMALDVGLPSSKLKSKTSQLSGGMQRKLSVALAFVGGSKVVILDEPTAGVDPYSRRGIWELLLKYRQGRTIILSTHHMDEADVLGDRIAIISHGKLCCVGSSLFLKNQLGTGYYLTLVKKDVESSLSSCRNSSSTVSYLKKEDSVSQSSSDAGLGSDHESDTLTIDVSAISNLIRKHVSEARLVEDIGHELTYVLPYEAAKEGAFVELFHEIDDRLSDLGISSYGISETTLEEIFLKVAEESGVDAETSDGTLPARRNRRAFGDKQSCLRPFTEDDAADPNDSDIDPESRETDLLSGMDGKGSYQVKGWKLTQQQFVALLWKRLLIARRSRKGFFAQIVLPAVFVCIALVFSLIVPPFGKYPSLELQPWMYNEQYTFVSNDAPEDTGTLELLNALTKDPGFGTRCMEGNPIPDTPCQAGEEEWTTAPVPQTIMDLFQNGNWTMQNPSPACQCSSDKIKKMLPVCPPGAGGLPPPQRKQNTADILQDLTGRNISDYLVKTYVQIIAKSLKNKIWVNEFRYGGFSLGVSNTQALPPSQEVNDATKQMKKHLKLAKDSSADRFLNSLGRFMTGLDTRNNVKVWFNNKGWHAISSFLNVINNAILRANLQKGENPSHYGITAFNHPLNLTKQQLSEVAPMTTSVDVLVSICVIFAMSFVPASFVVFLIQERVSKAKHLQFISGVKPVIYWLSNFVWDMCNYVVPATLVIIIFICFQQKSYVSSTNLPVLALLLLLYGWSITPLMYPASFVFKIPSTAYVVLTSVNLFIGINGSVATFVLELFTDNKLNNINDILKSVFLIFPHFCLGRGLIDMVKNQAMADALERFGENRFVSPLSWDLVGRNLFAMAVEGVVFFLITVLIQYRFFIRPRPVNAKLSPLNDEDEDVRRERQRILDGGGQNDILEIKELTKIYRRKRKPAVDRICVGIPPGECFGLLGVNGAGKSSTFKMLTGDTTVTRGDAFLNRNSILSNIHEVHQNMGYCPQFDAITELLTGREHVEFFALLRGVPEKEVGKVGEWAIRKLGLVKYGEKYAGNYSGGNKRKLSTAMALIGGPPVVFLDEPTTGMDPKARRFLWNCALSVVKEGRSVVLTSHSMEECEALCTRMAIMVNGRFRCLGSVQHLKNRFGDGYTIVVRIAGSNPDLKPVQDFFGLAFPGSVPKEKHRNMLQYQLPSSLSSLARIFSILSQSKKRLHIEDYSVSQTTLDQVFVNFAKDQSDDDHLKDLSLHKNQTVVDVAVLTSFLQDEKVKESYV

SEQ ID NO: 131 - protein, 2261 aa, Homo sapiens
MACWPQLRLLLWKNLTFRRRQTCQLLLEVAWPLFIFLILISVRLSYPPYEQHECHFPNKAMPSAGTLPWVQGIICNANNPCFRYPTPGEAPGVVGNFNKSIVARLFSDARRLLLYSQKDTSMKDMRKVLRTLQQIKKSSSNLKLQDFLVDNETFSGFLYHNLSLPKSTVDKMLRADVILHKVFLQGYQLHLTSLCNGSKSEEMIQLGDQEVSELCGLPREKLAAAERVLRSNMDILKPILRTLNSTSPFPSKELAEATKTLLHSLGTLAQELFSMRSWSDMRQEVMFLTNVNSSSSSTQIYQAVSRIVCGHPEGGGLKIKSLNWYEDNNYKALFGGNGTEEDAETFYDNSTTPYCNDLMKNLESSPLSRIIWKALKPLLVGKILYTPDTPATRQVMAEVNKTFQELAVFHDLEGMWEELSPKIWTFMENSQEMDLVRMLLDSRDNDHFWEQQLDGLDWTAQDIVAFLAKHPEDVQSSNGSVYTWREAFNETNQAIRTISRFMECVNLNKLEPIATEVWLINKSMELLDERKFWAGIVFTGITPGSIELPHHVKYKIRMDIDNVERTNKIKDGYWDPGPRADPFEDMRYVWGGFAYLQDVVEQAIIRVLTGTEKKTGVYMQQMPYPCYVDDIFLRVMSRSMPLFMTLAWIYSVAVIIKGIVYEKEARLKETMRIMGLDNSILWFSWFISSLIPLLVSAGLLVVILKLGNLLPYSDPSVVFVFLSVFAVVTILQCFLISTLFSRANLAAACGGIIYFTLYLPYVLCVAWQDYVGFTLKIFASLLSPVAFGFGCEYFALFEEQGIGVQWDNLFESPVEEDGFNLTTSVSMMLFDTFLYGVMTWYIEAVFPGQYGIPRPWYFPCTKSYWFGEESDEKSHPGSNQKRMSEICMEEEPTHLKLGVSIQNLVKVYRDGMKVAVDGLALNFYEGQITSFLGHNGAGKTTTMSILTGLFPPTSGTAYILGKDIRSEMSTIRQNLGVCPQHNVLFDMLTVEEHIWFYARLKGLSEKHVKAEMEQMALDVGLPSSKLKSKTSQLSGGMQRKLSVALAFVGGSKVVILDEPTAGVDPYSRRGIWELLLKYRQGRTIILSTHHMDEADVLGDRIAIISHGKLCCVGSSLFLKNQLGTGYYLTLVKKDVESSLSSCRNSSSTVSYLKKEDSVSQSSSDAGLGSDHESDTLTIDVSAISNLIRKHVSEARLVEDIGHELTYVLPYEAAKEGAFVELFHEIDDRLSDLGISSYGISETTLEEIFLKVAEESGVDAETSDGTLPARRNRRAFGDKQSCLRPFTEDDAADPNDSDIDPESRETDLLSGMDGKGSYQVKGWKLTQQQFVALLWKRLLIARRSRKGFFAQIVLPAVFVCIALVFSLIVPPFGKYPSLELQPWMYNEQYTFVSNDAPEDTGTLELLNALTKDPGFGTRCMEGNPIPDTPCQAGEEEWTTAPVPQTIMDLFQNGNWTMQNPSPACQCSSDKIKKMLPVCPPGAGGLPPPQRKQNTADILQDLTGRNISDYLVKTYVQIIAKSLKNKIWVNEFRYGGFSLGVSNTQALPPSQEVNDATKQMKKHLKLAKDSSADRFLNSLGRFMTGLDTRNNVKVWFNNKGWHAISSFLNVINNAILRANLQKGENPSHYGITAFNHPLNLTKQQLSEVAPMTTSVDVLVSICVIFAMSFVPASFVVFLIQERVSKAKHLQFISGVKPVIYWLSNFVWDMCNYVVPATLVIIIFICFQQKSYVSSTNLPVLALLLLLYGWSITPLMYPASFVFKIPSTAYVVLTSVNLFIGINGSVATFVLELFTDNKLNNINDILKSVFLIFPHFCLGRGLIDMVKNQAMADALERFGENRFVSPLSWDLVGRNLFAMAVEGVVFFLITVLIQYRFFIRPRPVNAKLSPLNDEDEDVRRERQRILDGGGQNDILEIKELTKIYRRKRKPAVDRICVGIPPGECFGLLGVNGAGKSSTFKMLTGDTTVTRGDAFLNRNSILSNIHEVHQNMGYCPQFDAITELLTGREHVEFFALLRGVPEKEVGKVGEWAIRKLGLVKYGEKYAGNYSGGNKRKLSTAMALIGGPPVVFLDEPTTGMDPKARRFLWNCALSVVKEGRSVVLTSHSMEECEALCTRMAIMVNGRFRCLGSVQHLKNRFGDGYTIVVRIAGSNPDLKPVQDFFGLAFPGSVPKEKHRNMLQYQLPSSLSSLARIFSILSQSKKRLHIEDYSVSQTTLDQVFVNFAKDQSDDDHLKDLSLHKNQTVVDVAVLTSFLQDEKVKESYV

SEQ ID NO: 132 - protein, 2261 aa, Homo sapiens
MACWPQLRLLLWKNLTFRRRQTCQLLLEVAWPLFIFLILISVRLSYPPYEQHECHFPNKAMPSAGTLPWVQGIICNANNPCFRYPTPGEAPGVVGNFNKSIVARLFSDARRLLLYSQKDTSMKDMRKVLRTLQQIKKSSSNLKLQDFLVDNETFSGFLYHNLSLPKSTVDKMLRADVILHKVFLQGYQLHLTSLCNGSKSEEMIQLGDQEVSELCGLPREKLAAAERVLRSNMDILKPILRTLNSTSPFPSKELAEATKTLLHSLGTLAQELFSMRSWSDMRQEVMFLTNVNSSSSSTQIYQAVSRIVCGHPEGGGLKIKSLNWYEDNNYKALFGGNGTEEDAETFYDNSTTPYCNDLMKNLESSPLSRIIWKALKPLLVGKILYTPDTPATRQVMAEVNKTFQELAVFHDLEGMWEELSPKIWTFMENSQEMDLVRMLLDSRDNDHFWEQQLDGLDWTAQDIVAFLAKHPEDVQSSNGSVYTWREAFNETNQAIRTISRFMECVNLNKLEPIATEVWLINKSMELLDERKFWAGIVFTGITPGSIELPHHVKYKIRMDIDNVERTNKIKDGYWDPGPRADPFEDMRYVWGGFAYLQDVVEQAIIRVLTGTEKKTGVYMQQMPYPCYVDDIFLRVMSRSMPLFMTLAWIYSVAVIIKGIVYEKEARLKETMRIMGLDNSILWFSWFISSLIPLLVSAGLLVVILKLGNLLPYSDPSVVFVFLSVFAVVTILQCFLISTLFSRANLAAACGGIIYFTLYLPYVLCVAWQDYVGFTLKIFASLLSPVAFGFGCEYFALFEEQGIGVQWDNLFESPVEEDGFNLTTSVSMMLFDTFLYGVMTWYIEAVFPGQYGIPRPWYFPCTKSYWFGEESDEKSHPGSNQKRISEIFMEEEPTHLKLGVSIQNLVKVYRDGMKVAVDGLALNFYEGQITSFLGHNGAGKTTTMSILTGLFPPTSGTAYILGKDIRSEMSTIRQNLGVCPQHNVLFDMLTVEEHIWFYARLKGLSEKHVKAEMEQMALDVGLPSSKLKSKTSQLSGGMQRKLSVALAFVGGSKVVILDEPTAGVDPYSRRGIWELLLKYRQGRTIILSTHHMDEADVLGDRIAIISHGKLCCVGSSLFLKNQLGTGYYLTLVKKDVESSLSSCRNSSSTVSYLKKEDSVSQSSSDAGLGSDHESDTLTIDVSAISNLIRKHVSEARLVEDIGHELTYVLPYEAAKEGAFVELFHEIDDRLSDLGISSYGISETTLEEIFLKVAEESGVDAETSDGTLPARRNRRAFGDKQSCLRPFTEDDAADPNDSDIDPESRETDLLSGMDGKGSYQVKGWKLTQQQFVALLWKRLLIARRSRKGFFAQIVLPAVFVCIALVFSLIVPPFGKYPSLELQPWMYNEQYTFVSNDAPEDTGTLELLNALTKDPGFGTRCMEGNPIPDTPCQAGEEEWTTAPVPQTIMDLFQNGNWTMQNPSPACQCSSDKIKKMLPVCPPGAGGLPPPQRKQNTADILQDLTGRNISDYLVKTYVQIIAKSLKNKIWVNEFRYGGFSLGVSNTQALPPSQEVNDATKQMKKHLKLAKDSSADRFLNSLGRFMTGLDTRNNVKVWFNNKGWHAISSFLNVINNAILRANLQKGENPSHYGITAFNHPLNLTKQQLSEVAPMTTSVDVLVSICVIFAMSFVPASFVVFLIQERVSKAKHLQFISGVKPVIYWLSNFVWDMCNYVVPATLVIIIFICFQQKSYVSSTNLPVLALLLLLYGWSITPLMYPASFVFKIPSTAYVVLTSVNLFIGINGSVATFVLELFTDNKLNNINDILKSVFLIFPHFCLGRGLIDMVKNQAMADALERFGENRFVSPLSWDLVGRNLFAMAVEGVVFFLITVLIQYRFFIRPRPVNAKLSPLNDEDEDVRRERQRILDGGGQNDILEIKELTKIYRRKRKPAVDRICVGIPPGECFGLLGVNGAGKSSTFKMLTGDTTVTRGDAFLNRNSILSNIHEVHQNMGYCPQFDAITELLTGREHVEFFALLRGVPEKEVGKVGEWAIRKLGLVKYGEKYAGNYSGGNKRKLSTAMALIGGPPVVFLDEPTTGMDPKARRFLWNCALSVVKEGRSVVLTSHSMEECEALCTRMAIMVNGRFRCLGSVQHLKNRFGDGYTIVVRIAGSNPDLKPVQDFFGLAFPGSVPKEKHRNMLQYQLPSSLSSLARIFSILSQSKKRLHIEDYSVSQTTLDQVFVNFAKDQSDDDHLKDLSLHKNQTVVDVAVLTSFLQDEKVKESYV

SEQ ID NO: 133 - protein, 2261 aa, Homo sapiens
MACWPQLRLLLWKNLTFRRRQTCQLLLEVAWPLFIFLILISVRLSYPPYEQHECHFPNKAMPSAGTLPWVQGIICNANNPCFRYPTPGEAPGVVGNFNKSIVARLFSDARRLLLYSQKDTSMKDMRKVLRTLQQIKKSSSNLKLQDFLVDNETFSGFLYHNLSLPKSTVDKMLRADVILHKVFLQGYQLHLTSLCNGSKSEEMIQLGDQEVSELCGLPREKLAAAERVLRSNMDILKPILRTLNSTSPFPSKELAEATKTLLHSLGTLAQELFSMRSWSDMRQEVMFLTNVNSSSSSTQIYQAVSRIVCGHPEGGGLKIKSLNWYEDNNYKALFGGNGTEEDAETFYDNSTTPYCNDLMKNLESSPLSRIIWKALKPLLVGKILYTPDTPATRQVMAEVNKTFQELAVFHDLEGMWEELSPKIWTFMENSQEMDLVRMLLDSRDNDHFWEQQLDGLDWTAQDIVAFLAKHPEDVQSSNGSVYTWREAFNETNQAIRTISRFMECVNLNKLEPIATEVWLINKSMELLDERKFWAGIVFTGITPGSIELPHHVKYKIRMDIDNVERTNKIKDGYWDPGPRADPFEDMRYVWGGFAYLQDVVEQAIIRVLTGTEKKTGVYMQQMPYPCYVDDIFLRVMSRSMPLFMTLAWIYSVAVIIKGIVYEKEARLKETMRIMGLDNSILWFSWFISSLIPLLVSAGLLVVILKLGNLLPYSDPSVVFVFLSVFAVVTILQCFLISTLFSRANLAAACGGIIYFTLYLPYVLCVAWQDYVGFTLKIFASLLSPVAFGFGCEYFALFEEQGIGVQWDNLFESPVEEDGFNLTTSVSMMLFDTFLYGVMTWYIEAVFPGQYGIPRPWYFPCTKSYWFGEESDEKSHPGSNQKRISEICMEEEPTHLKLGVSIQNLVKVYRDGMKVAVDGLALNFYEGQITSFLGHNGAGKTTTMSILTGLFPPTSGTAYILGKDIRSEMSTIRQNLGVCPQHNVLFDMLTVEEHIWFYARLKGLSEKHVKAEMEQMALDVGLPSSKLKSKTSQLSGGMQRKLSVALAFVGGSKVVILDEPTAGVDPYSRRGIWELLLKYRQGRTIILSTHHMDEADVLGDRIAIISHGKLCCVGSSLFLKNQCGTGYYLTLVKKDVESSLSSCRNSSSTVSYLKKEDSVSQSSSDAGLGSDHESDTLTIDVSAISNLIRKHVSEARLVEDIGHELTYVLPYEAAKEGAFVELFHEIDDRLSDLGISSYGISETTLEEIFLKVAEESGVDAETSDGTLPARRNRRAFGDKQSCLRPFTEDDAADPNDSDIDPESRETDLLSGMDGKGSYQVKGWKLTQQQFVALLWKRLLIARRSRKGFFAQIVLPAVFVCIALVFSLIVPPFGKYPSLELQPWMYNEQYTFVSNDAPEDTGTLELLNALTKDPGFGTRCMEGNPIPDTPCQAGEEEWTTAPVPQTIMDLFQNGNWTMQNPSPACQCSSDKIKKMLPVCPPGAGGLPPPQRKQNTADILQDLTGRNISDYLVKTYVQIIAKSLKNKIWVNEFRYGGFSLGVSNTQALPPSQEVNDATKQMKKHLKLAKDSSADRFLNSLGRFMTGLDTRNNVKVWFNNKGWHAISSFLNVINNAILRANLQKGENPSHYGITAFNHPLNLTKQQLSEVAPMTTSVDVLVSICVIFAMSFVPASFVVFLIQERVSKAKHLQFISGVKPVIYWLSNFVWDMCNYVVPATLVIIIFICFQQKSYVSSTNLPVLALLLLLYGWSITPLMYPASFVFKIPSTAYVVLTSVNLFIGINGSVATFVLELFTDNKLNNINDILKSVFLIFPHFCLGRGLIDMVKNQAMADALERFGENRFVSPLSWDLVGRNLFAMAVEGVVFFLITVLIQYRFFIRPRPVNAKLSPLNDEDEDVRRERQRILDGGGQNDILEIKELTKIYRRKRKPAVDRICVGIPPGECFGLLGVNGAGKSSTFKMLTGDTTVTRGDAFLNRNSILSNIHEVHQNMGYCPQFDAITELLTGREHVEFFALLRGVPEKEVGKVGEWAIRKLGLVKYGEKYAGNYSGGNKRKLSTAMALIGGPPVVFLDEPTTGMDPKARRFLWNCALSVVKEGRSVVLTSHSMEECEALCTRMAIMVNGRFRCLGSVQHLKNRFGDGYTIVVRIAGSNPDLKPVQDFFGLAFPGSVPKEKHRNMLQYQLPSSLSSLARIFSILSQSKKRLHIEDYSVSQTTLDQVFVNFAKDQSDDDHLKDLSLHKNQTVVDVAVLTSFLQDEKVKESYV

SEQ ID NO: 134 - protein, 2261 aa, Homo sapiens
MACWPQLRLLLWKNLTFRRRQTCQLLLEVAWPLFIFLILISVRLSYPPYEQHECHFPNKAMPSAGTLPWVQGIICNANNPCFRYPTPGEAPGVVGNFNKSIVARLFSDARRLLLYSQKDTSMKDMRKVLRTLQQIKKSSSNLKLQDFLVDNETFSGFLYHNLSLPKSTVDKMLRADVILHKVFLQGYQLHLTSLCNGSKSEEMIQLGDQEVSELCGLPREKLAAAERVLRSNMDILKPILRTLNSTSPFPSKELAEATKTLLHSLGTLAQELFSMRSWSDMRQEVMFLTNVNSSSSSTQIYQAVSRIVCGHPEGGGLKIKSLNWYEDNNYKALFGGNGTEEDAETFYDNSTTPYCNDLMKNLESSPLSRIIWKALKPLLVGKILYTPDTPATRQVMAEVNKTFQELAVFHDLEGMWEELSPKIWTFMENSQEMDLVRMLLDSRDNDHFWEQQLDGLDWTAQDIVAFLAKHPEDVQSSNGSVYTWREAFNETNQAIRTISRFMECVNLNKLEPIATEVWLINKSMELLDERKFWAGIVFTGITPGSIELPHHVKYKIRMDIDNVERTNKIKDGYWDPGPRADPFEDMRYVWGGFAYLQDVVEQAIIRVLTGTEKKTGVYMQQMPYPCYVDDIFLRVMSRSMPLFMTLAWIYSVAVIIKGIVYEKEARLKETMRIMGLDNSILWFSWFISSLIPLLVSAGLLVVILKLGNLLPYSDPSVVFVFLSVFAVVTILQCFLISTLFSRANLAAACGGIIYFTLYLPYVLCVAWQDYVGFTLKIFASLLSPVAFGFGCEYFALFEEQGIGVQWDNLFESPVEEDGFNLTTSVSMMLFDTFLYGVMTWYIEAVFPGQYGIPRPWYFPCTKSYWFGEESDEKSHPGSNQKRISEICMEEEPTHLKLGVSIQNLVKVYRDGMKVAVDGLALNFYEGQITSFLGHNGAGKTTTMSILTGLFPPTSGTAYILGKDIRSEMSTIRQNLGVCPQHNVLFDMLTVEEHIWFYARLKGLSEKHVKAEMEQMALDVGLPSSKLKSKTSQLSGGMQRKLSVALAFVGGSKVVILDEPTAGVDPYSRRGIWELLLKYRQGRTIILSTHHMDEADVLGDRIAIISHGKLCCVGSSLFLKNQLGTGYYLTLVKKDVESSLSSCRNSSSTVSYLKKEDSVSQSSSDAGLGSDHDSDTLTIDVSAISNLIRKHVSEARLVEDIGHELTYVLPYEAAKEGAFVELFHEIDDRLSDLGISSYGISETTLEEIFLKVAEESGVDAETSDGTLPARRNRRAFGDKQSCLRPFTEDDAADPNDSDIDPESRETDLLSGMDGKGSYQVKGWKLTQQQFVALLWKRLLIARRSRKGFFAQIVLPAVFVCIALVFSLIVPPFGKYPSLELQPWMYNEQYTFVSNDAPEDTGTLELLNALTKDPGFGTRCMEGNPIPDTPCQAGEEEWTTAPVPQTIMDLFQNGNWTMQNPSPACQCSSDKIKKMLPVCPPGAGGLPPPQRKQNTADILQDLTGRNISDYLVKTYVQIIAKSLKNKIWVNEFRYGGFSLGVSNTQALPPSQEVNDATKQMKKHLKLAKDSSADRFLNSLGRFMTGLDTRNNVKVWFNNKGWHAISSFLNVINNAILRANLQKGENPSHYGITAFNHPLNLTKQQLSEVAPMTTSVDVLVSICVIFAMSFVPASFVVFLIQERVSKAKHLQFISGVKPVIYWLSNFVWDMCNYVVPATLVIIIFICFQQKSYVSSTNLPVLALLLLLYGWSITPLMYPASFVFKIPSTAYVVLTSVNLFIGINGSVATFVLELFTDNKLNNINDILKSVFLIFPHFCLGRGLIDMVKNQAMADALERFGENRFVSPLSWDLVGRNLFAMAVEGVVFFLITVLIQYRFFIRPRPVNAKLSPLNDEDEDVRRERQRILDGGGQNDILEIKELTKIYRRKRKPAVDRICVGIPPGECFGLLGVNGAGKSSTFKMLTGDTTVTRGDAFLNRNSILSNIHEVHQNMGYCPQFDAITELLTGREHVEFFALLRGVPEKEVGKVGEWAIRKLGLVKYGEKYAGNYSGGNKRKLSTAMALIGGPPVVFLDEPTTGMDPKARRFLWNCALSVVKEGRSVVLTSHSMEECEALCTRMAIMVNGRFRCLGSVQHLKNRFGDGYTIVVRIAGSNPDLKPVQDFFGLAFPGSVPKEKHRNMLQYQLPSSLSSLARIFSILSQSKKRLHIEDYSVSQTTLDQVFVNFAKDQSDDDHLKDLSLHKNQTVVDVAVLTSFLQDEKVKESYV

SEQ ID NO: 135 - protein, 2261 aa, Homo sapiens
MACWPQLRLLLWKNLTFRRRQTCQLLLEVAWPLFIFLILISVRLSYPPYEQHECHFPNKAMPSAGTLPWVQGIICNANNPCFRYPTPGEAPGVVGNFNKSIVARLFSDARRLLLYSQKDTSMKDMRKVLRTLQQIKKSSSNLKLQDFLVDNETFSGFLYHNLSLPKSTVDKMLRADVILHKVFLQGYQLHLTSLCNGSKSEEMIQLGDQEVSELCGLPREKLAAAERVLRSNMDILKPILRTLNSTSPFPSKELAEATKTLLHSLGTLAQELFSMRSWSDMRQEVMFLTNVNSSSSSTQIYQAVSRIVCGHPEGGGLKIKSLNWYEDNNYKALFGGNGTEEDAETFYDNSTTPYCNDLMKNLESSPLSRIIWKALKPLLVGKILYTPDTPATRQVMAEVNKTFQELAVFHDLEGMWEELSPKIWTFMENSQEMDLVRMLLDSRDNDHFWEQQLDGLDWTAQDIVAFLAKHPEDVQSSNGSVYTWREAFNETNQAIRTISRFMECVNLNKLEPIATEVWLINKSMELLDERKFWAGIVFTGITPGSIELPHHVKYKIRMDIDNVERTNKIKDGYWDPGPRADPFEDMRYVWGGFAYLQDVVEQAIIRVLTGTEKKTGVYMQQMPYPCYVDDIFLRVMSRSMPLFMTLAWIYSVAVIIKGIVYEKEARLKETMRIMGLDNSILWFSWFISSLIPLLVSAGLLVVILKLGNLLPYSDPSVVFVFLSVFAVVTILQCFLISTLFSRANLAAACGGIIYFTLYLPYVLCVAWQDYVGFTLKIFASLLSPVAFGFGCEYFALFEEQGIGVQWDNLFESPVEEDGFNLTTSVSMMLFDTFLYGVMTWYIEAVFPGQYGIPRPWYFPCTKSYWFGEESDEKSHPGSNQKRISEICMEEEPTHLKLGVSIQNLVKVYRDGMKVAVDGLALNFYEGQITSFLGHNGAGKTTTMSILTGLFPPTSGTAYILGKDIRSEMSTIRQNLGVCPQHNVLFDMLTVEEHIWFYARLKGLSEKHVKAEMEQMALDVGLPSSKLKSKTSQLSGGMQRKLSVALAFVGGSKVVILDEPTAGVDPYSRRGIWELLLKYRQGRTIILSTHHMDEADVLGDRIAIISHGKLCCVGSSLFLKNQLGTGYYLTLVKKDVESSLSSCRNSSSTVSYLKKEDSVSQSSSDAGLGSDHESDTLTIDVSAISNLIRKHVSEARLVEDIGHELTYVLPYEAAKEGAFVELFHEIDDRLSDLGISSYGISETTLEEIFLKVAEESGVDAETSDGTLPARRNRRAFGDKQSCLRPFTEDDAADPNDSDIDPESRETDLLSGMDGKGSYQVKGWKLTQQQFVALLWKRLLIARRSRKGFFAQIVLPAVFVCIALVFSLIVPPFGKYPSLELQPWMYNEQYTFVSNDAPEDTGTLELLNALTKDPGFGTRCMEGNPIPDTPCQAGEEEWTTAPVPQTIMDLFQNGNWTMQNPSPACQCSSDKIKKMLPVCPPGAGGLPPPQRKQNTADILQDLTGRNISDYLVKTYVQIIAKSLKNKIWVNEFRYGGFSLGVSNTQALPPSQEVNDATKQMKKHLKLAKDSSADRFLNSLGRFMTGLDTKNNVKVWFNNKGWHAISSFLNVINNAILRANLQKGENPSHYGITAFNHPLNLTKQQLSEVAPMTTSVDVLVSICVIFAMSFVPASFVVFLIQERVSKAKHLQFISGVKPVIYWLSNFVWDMCNYVVPATLVIIIFICFQQKSYVSSTNLPVLALLLLLYGWSITPLMYPASFVFKIPSTAYVVLTSVNLFIGINGSVATFVLELFTDNKLNNINDILKSVFLIFPHFCLGRGLIDMVKNQAMADALERFGENRFVSPLSWDLVGRNLFAMAVEGVVFFLITVLIQYRFFIRPRPVNAKLSPLNDEDEDVRRERQRILDGGGQNDILEIKELTKIYRRKRKPAVDRICVGIPPGECFGLLGVNGAGKSSTFKMLTGDTTVTRGDAFLNRNSILSNIHEVHQNMGYCPQFDAITELLTGREHVEFFALLRGVPEKEVGKVGEWAIRKLGLVKYGEKYAGNYSGGNKRKLSTAMALIGGPPVVFLDEPTTGMDPKARRFLWNCALSVVKEGRSVVLTSHSMEECEALCTRMAIMVNGRFRCLGSVQHLKNRFGDGYTIVVRIAGSNPDLKPVQDFFGLAFPGSVPKEKHRNMLQYQLPSSLSSLARIFSILSQSKKRLHIEDYSVSQTTLDQVFVNFAKDQSDDDHLKDLSLHKNQTVVDVAVLTSFLQDEKVKESYV

SEQ ID NO: 136 - protein, 2261 aa, Homo sapiens
MACWPQLRLLLWKNLTFRRRQTCQLLLEVAWPLFIFLILISVRLSYPPYEQHECHFPNKAMPSAGTLPWVQGIICNANNPCFRYPTPGEAPGVVGNFNKSIVARLFSDARRLLLYSQKDTSMKDMRKVLRTLQQIKKSSSNLKLQDFLVDNETFSGFLYHNLSLPKSTVDKMLRADVILHKVFLQGYQLHLTSLCNGSKSEEMIQLGDQEVSELCGLPREKLAAAERVLRSNMDILKPILRTLNSTSPFPSKELAEATKTLLHSLGTLAQELFSMRSWSDMRQEVMFLTNVNSSSSSTQIYQAVSRIVCGHPEGGGLKIKSLNWYEDNNYKALFGGNGTEEDAETFYDNSTTPYCNDLMKNLESSPLSRIIWKALKPLLVGKILYTPDTPATRQVMAEVNKTFQELAVFHDLEGMWEELSPKIWTFMENSQEMDLVRMLLDSRDNDHFWEQQLDGLDWTAQDIVAFLAKHPEDVQSSNGSVYTWREAFNETNQAIRTISRFMECVNLNKLEPIATEVWLINKSMELLDERKFWAGIVFTGITPGSIELPHHVKYKIRMDIDNVERTNKIKDGYWDPGPRADPFEDMRYVWGGFAYLQDVVEQAIIRVLTGTEKKTGVYMQQMPYPCYVDDIFLRVMSRSMPLFMTLAWIYSVAVIIKGIVYEKEARLKETMRIMGLDNSILWFSWFISSLIPLLVSAGLLVVILKLGNLLPYSDPSVVFVFLSVFAVVTILQCFLISTLFSRANLAAACGGIIYFTLYLPYVLCVAWQDYVGFTLKIFASLLSPVAFGFGCEYFALFEEQGIGVQWDNLFESPVEEDGFNLTTSVSMMLFDTFLYGVMTWYIEAVFPGQYGIPRPWYFPCTKSYWFGEESDEKSHPGSNQKRISEICMEEEPTHLKLGVSIQNLVKVYRDGMKVAVDGLALNFYEGQITSFLGHNGAGKTTTMSILTGLFPPTSGTAYILGKDIRSEMSTIRQNLGVCPQHNVLFDMLTVEEHIWFYARLKGLSEKHVKAEMEQMALDVGLPSSKLKSKTSQLSGGMQRKLSVALAFVGGSKVVILDEPTAGVDPYSRRGIWELLLKYRQGRTIILSTHHMDEADVLGDRIAIISHGKLCCVGSSLFLKNQLGTGYYLTLVKKDVESSLSSCRNSSSTVSYLKKEDSVSQSSSDAGLGSDHESDTLTIDVSAISNLIRKHVSEARLVEDIGHELTYVLPYEAAKEGAFVELFHEIDDRLSDLGISSYGISETTLEEIFLKVAEESGVDAETSDGTLPARRNRRAFGDKQSCLRPFTEDDAADPNDSDIDPESRETDLLSGMDGKGSYQVKGWKLTQQQFVALLWKRLLIARRSRKGFFAQIVLPAVFVCIALVFSLIVPPFGKYPSLELQPWMYNEQYTFVSNDAPEDTGTLELLNALTKDPGFGTRCMEGNPIPDTPCQAGEEEWTTAPVPQTIMDLFQNGNWTMQNPSPACQCSSDKIKKMLPVCPPGAGGLPPPQRKQNTADILQDLTGRNISDYLVKTYVQIIAKSLKNKIWVNEFRYGGFSLGVSNTQALPPSQEVNDATKQMKKHLKLAKDSSADRFLNSLGRFMTGLDTRNNVKVWFNNKGWHAISSFLNVINNAILRANLQKGENPSHYGITAFNHPLNLTKQQLSEVAPMTTSVDVLVSICVIFAMSFVPASFVIFLIQERVSKAKHLQFISGVKPVIYWLSNFVWDMCNYVVPATLVIIIFICFQQKSYVSSTNLPVLALLLLLYGWSITPLMYPASFVFKIPSTAYVVLTSVNLFIGINGSVATFVLELFTDNKLNNINDILKSVFLIFPHFCLGRGLIDMVKNQAMADALERFGENRFVSPLSWDLVGRNLFAMAVEGVVFFLITVLIQYRFFIRPRPVNAKLSPLNDEDEDVRRERQRILDGGGQNDILEIKELTKIYRRKRKPAVDRICVGIPPGECFGLLGVNGAGKSSTFKMLTGDTTVTRGDAFLNRNSILSNIHEVHQNMGYCPQFDAITELLTGREHVEFFALLRGVPEKEVGKVGEWAIRKLGLVKYGEKYAGNYSGGNKRKLSTAMALIGGPPVVFLDEPTTGMDPKARRFLWNCALSVVKEGRSVVLTSHSMEECEALCTRMAIMVNGRFRCLGSVQHLKNRFGDGYTIVVRIAGSNPDLKPVQDFFGLAFPGSVPKEKHRNMLQYQLPSSLSSLARIFSILSQSKKRLHIEDYSVSQTTLDQVFVNFAKDQSDDDHLKDLSLHKNQTVVDVAVLTSFLQDEKVKESYV

SEQ ID NO: 137 - DNA, 2893 bp, Homo sapiens
acagggcatggtggcaggtgcctgtaatctcagttactcgggaggtggaggttgcaatgagcccagatcgcaccattgcactccagcctgggcaacaaaaggtgaaactccatctcaattaaaaaaaaaagaatgattttggtggtcgacttcaaataggtaggagaagaaggagagaggagatggagggtcagggagatctaattactctctaaaatcatgctaggaaagataacaccttttaataacactctctgcttttataacatcattctgccaaggagctcaaaggtttcaacaaagttcactttcagaaaacccctttgaggaagacagaatatacatcttctctccattttaaagatgaagaaacaggccgggcacaatggctaatgcctgtaatcccagcactttgggaggctgaggccagaggatcgcttgagctccagagtttgagaccagcctggataacatggcaaaaccctgtctctacaaaaaaaatacgaaaattagatgggtgtggtggcatgcacctgtggtcccagctacttgggaggctaaggtgggaggatcgcttgagcccagggagtcaagtctacactgagccatgattggatcactgcactccagcctgggtagacagagcaagaccctgtctcaaaaaaaagaaatgaaagagaaagaaagaaagaggagaggagaggagatgaggggaggagggagggggggaggaaggaaggaaggaaggaaggaaaaaaagatgaaaaaagaaaaaaacaagatgaaacagaggcagaaagactttacgtaaattgctcatcatgtggttgtcaagtttgaccccaaaacccaatttattgaccaaggttattctttgactgaggcaagggggtccgctctcctgggccttgggctttagaaagctcatctctggcctttctgagatccatccctttctttttatttttcttgacacggagtcttgctctgtcactcaggctggagtgcagtggcatgatctcgactcactgtaacctctgcctcccgggttcaagcgattctcctgcctcagcctcctgagataacaggcgcccgccaccacatctggctaatttttgtatttttagtaaagactgggtttcatcatgttggccaggttggtttcgaactcctgacctgaggtgagctgcccaccttggcctcccaaagtgctgggattacaggcatgagccactgcgcccagctcagatccatccctttctaagggcaaacagtccatggtgcaaaggggccatgccacccagagttatgagtacctgggactccagaattccttgcctggtggcctccacatgcacttccagggcctgcttgggcctcttctatgcgtctgtcctgagtgttgatagaaccactgatgtgagtacctgggcttgagccgtggcctggagatcctgttgactgtagcatggagggggcttgtgcagctgaatgtctgcatgcaggtggtgggagttctggaatatgatggagctggaggtgggaagagaagtaggcttggggcagctctctcatgccacctcattctggccaaaactcaggtcaaactgtgaagagtctaaatgtgaatctgcccttcaaggtggctacaaaggtatctttgtcaaggtaggagaccttgtggcctccacgtgcacttccagggcctgcttgggcctcttctacgggtctgtcctgagtcttctatgaatccttcagggcagattcatatttagactcttcacagtttgacctgagttttggccagaataaggtgacatttagtttgttggcttgatggatgacttaaatatttagacatggtgtgtaggcctgcattcctactcttgcctttttttttgcccctccagtgttttgggtagttttgctcccctacagccaaaggcaaacagagaagttggaggtctggagtggctacataattttacacgactgcaattctctggctgcacttcacaaatgtatacaaactaaatacaagtcctgtgtttttatcacagggaggctgatcaatataatgaaattaaaagggggctggtccatattgttctgtgtttttgtttgtttgttttgtttgtttctttttttgtttttgtggcctccttcctctcaatttatgaagagaagcagtaagatgttcctctcgggtcctctgagggacctggggagctcaggctgggaatctccaaggcagtaggtcgcctatcaaaaatcaaagtccaggtttgtggggggaaaacaaaagcagcccattacccagaggactgtccgccttcccctcaccccagcctaggcctttgaaaggaaacaaaagacaagacaaaatgattggcgtcctgagggagattcagcctagagctctctctcccccaatccctccctccggctgaggaaactaacaaaggaaaaaaaaattgcggaaagcaggatttagaggaagcaaattccactggtgcccttggctgccgggaacgtggactagagagtctgcggcgcagccccgagcccagcgcttcccgcgcgtcttaggccggcgggcccgggcgggggaaggggacgcagaccgcggaccctaagacacctgctgtaccctccacccccaccccaccccacccacctccccccaactccctagatgtgtcgtgggcggctgaacgtcgcccgtttaaggggcgggccccggctccacgtgctttctgctgagtgactgaactacataaacagaggccgggaagggggcggggaggagggagagcacaggctttgaccgatagtaacctctgcgctcggtgcagccgaatctataaaaggaactagtcccggcaaaaacccc

SEQ ID NO: 138 - DNA, 2903 bp, Homo sapiens
acagggcatggtggcaggtgcctgtaatctcagttactcgggaggtggaggttgcaatgagcccagatcgcaccattgcactccagcctgggcaacaaaaggtgaaactccatctcaattaaaaaaaaaagaatgattttggtggtcgacttcaaataggtaggagaagaaggagagaggagatggagggtcagggagatctaattactctctaaaatcatgctaggaaagataacaccttttaataacactctctgcttttataacatcattctgccaaggagctcaaaggtttcaacaaagttcactttcagaaaacccctttgaggaagacagaatatacatcttctctccattttaaagatgaagaaacaggccgggcacaatggctaatgcctgtaatcccagcactttgggaggctgaggccagaggatcgcttgagctccagagtttgagaccagcctggataacatggcaaaaccctgtctctacaaaaaaaatacaaaaattagatgggtgtggtggcatgcacctgtggtcccagctacttgggaggctaaggtgggaggatcgcttgagcccagggagtcaagtctacactgagccatgattggatcactgcactccagcctgggtagacagagcaagaccctgtctcaaaaaaaagaaatgaaagagaaagaaagaaagaggagaggagaggagatgaggggaggggaggggaggagggagggggggaggaaggaaggaaggaaggaaggaaaaaaagatgaaaaaagaaaaaaacaagatgaaacagaggcagaaagactttacgtaaattgctcatcatgtggttgtcaagtttgaccccaaaacccaatttattgaccaaggttattctttgactgaggcaagggggtccgctctcctgggccttgggctttagaaagctcatctctggcctttctgagatccatccctttctttttatttttcttgacacggagtcttgctctgtcactcaggctggagtgcagtggcatgatctcgactcactgtaacctctgcctcccgggttcaagcgattctcctgcctcagcctcctgagataacaggcgcccgccaccacatctggctaatttttgtatttttagtaaagactgggtttcatcatgttggccaggttggtttcgaactcctgacctgaggtgagctgcccaccttggcctcccaaagtgctgggattacaggcatgagccactgcgcccagctcagatccatccctttctaagggcaaacagtccatggtgcaaaggggccatgccacccagagttatgagtacctgggactccagaattccttgcctggtggcctccacatgcacttccagggcctgcttgggcctcttctatgcgtctgtcctgagtgttgatagaaccactgatgtgagtacctgggcttgagccgtggcctggagatcctgttgactgtagcatggagggggcttgtgcagctgaatgtctgcatgcaggtggtgggagttctggaatatgatggagctggaggtgggaagagaagtaggcttggggcagctctctcatgccacctcattctggccaaaactcaggtcaaactgtgaagagtctaaatgtgaatctgcccttcaaggtggctacaaaggtatctttgtcaaggtaggagaccttgtggcctccacgtgcacttccagggcctgcttgggcctcttctacgggtctgtcctgagtcttctatgaatccttcagggcagattcatatttagactcttcacagtttgacctgagttttggccagaataaggtgacatttagtttgttggcttgatggatgacttaaatatttagacatggtgtgtaggcctgcattcctactcttgcctttttttttgcccctccagtgttttgggtagttttgctcccctacagccaaaggcaaacagagaagttggaggtctggagtggctacataattttacacgactgcaattctctggctgcacttcacaaatgtatacaaactaaatacaagtcctgtgtttttatcacagggaggctgatcaatataatgaaattaaaagggggctggtccatattgttctgtgtttttgtttgtttgttttgtttgtttctttttttgtttttgtggcctccttcctctcaatttatgaagagaagcagtaagatgttcctctcgggtcctctgagggacctggggagctcaggctgggaatctccaaggcagtaggtcgcctatcaaaaatcaaagtccaggtttgtggggggaaaacaaaagcagcccattacccagaggactgtccgccttcccctcaccccagcctaggcctttgaaaggaaacaaaagacaagacaaaatgattggcgtcctgagggagattcagcctagagctctctctcccccaatccctccctccggctgaggaaactaacaaaggaaaaaaaaattgcggaaagcaggatttagaggaagcaaattccactggtgcccttggctgccgggaacgtggactagagagtctgcggcgcagccccgagcccagcgcttcccgcgcgtcttaggccggcgggcccgggcgggggaaggggacgcagaccgcggaccctaagacacctgctgtaccctccacccccaccccaccccacccacctccccccaactccctagatgtgtcgtgggcggctgaacgtcgcccgtttaaggggcgggccccggctccacgtgctttctgctgagtgactgaactacataaacagaggccgggaagggggcggggaggagggagagcacaggctttgaccgatagtaacctctgcgctcggtgcagccgaatctataaaaggaactagtcccggcaaaaacccc

SEQ ID NO: 139 - DNA, 2893 bp, Homo sapiens
acagggcatggtggcaggtgcctgtaatctcagttactcgggaggtggaggttgcaatgagcccagatcgcaccattgcactccagcctgggcaacaaaaggtgaaactccatctcaattaaaaaaaaaagaatgattttggtggtcgacttcaaataggtaggagaagaaggagagaggagatggagggtcagggagatctaattactctctaaaatcatgctaggaaagataacaccttttaataacactctctgcttttataacatcattctgccaaggagctcaaaggtttcaacaaagttcactttcagaaaacccctttgaggaagacagaatatacatcttctctccattttaaagatgaagaaacaggccgggcacaatggctaatgcctgtaatcccagcactttgggaggctgaggccagaggatcgcttgagctccagagtttgagaccagcctggataacatggcaaaaccctgtctctacaaaaaaaatacaaaaattagatgggtgtggtggcatgcacctgtggtcccagctacttgggaggctaaggtgggaggatcgcttgagcccagggagtcaagtctacactgagccatgattggatcactgcactccagcctgggtagacagagcaagaccctgtctcaaaaaaaagaaatgaaagagaaagaaagaaagaggagaggagaggagatgaggggaggagggagggggggaggaaggaaggaaggaaggaaggaaaaaaagatgaaaaaagaaaaaaacaagatgaaacagaggcagaaagactttacgtaaattgctcatcatgtggttgtcaagtttgaccccaaaacccaatttattgaccaaggttattctttgactgaggcaagggggtccgctctcctgggccttgggctttagaaagctcatctctggcctttctgagatccatccctttctttttatttttcttgacacggagtcttgctctgtcactcaggctggagtgcagtggcatgatctcgactcactgtaacctctgcctcccgggttcaagcgattctcctgcctcagcctcctgggataacaggcgcccgccaccacatctggctaatttttgtatttttagtaaagactgggtttcatcatgttggccaggttggtttcgaactcctgacctgaggtgagctgcccaccttggcctcccaaagtgctgggattacaggcatgagccactgcgcccagctcagatccatccctttctaagggcaaacagtccatggtgcaaaggggccatgccacccagagttatgagtacctgggactccagaattccttgcctggtggcctccacatgcacttccagggcctgcttgggcctcttctatgcgtctgtcctgagtgttgatagaaccactgatgtgagtacctgggcttgagccgtggcctggagatcctgttgactgtagcatggagggggcttgtgcagctgaatgtctgcatgcaggtggtgggagttctggaatatgatggagctggaggtgggaagagaagtaggcttggggcagctctctcatgccacctcattctggccaaaactcaggtcaaactgtgaagagtctaaatgtgaatctgcccttcaaggtggctacaaaggtatctttgtcaaggtaggagaccttgtggcctccacgtgcacttccagggcctgcttgggcctcttctacgggtctgtcctgagtcttctatgaatccttcagggcagattcatatttagactcttcacagtttgacctgagttttggccagaataaggtgacatttagtttgttggcttgatggatgacttaaatatttagacatggtgtgtaggcctgcattcctactcttgcctttttttttgcccctccagtgttttgggtagttttgctcccctacagccaaaggcaaacagagaagttggaggtctggagtggctacataattttacacgactgcaattctctggctgcacttcacaaatgtatacaaactaaatacaagtcctgtgtttttatcacagggaggctgatcaatataatgaaattaaaagggggctggtccatattgttctgtgtttttgtttgtttgttttgtttgtttctttttttgtttttgtggcctccttcctctcaatttatgaagagaagcagtaagatgttcctctcgggtcctctgagggacctggggagctcaggctgggaatctccaaggcagtaggtcgcctatcaaaaatcaaagtccaggtttgtggggggaaaacaaaagcagcccattacccagaggactgtccgccttcccctcaccccagcctaggcctttgaaaggaaacaaaagacaagacaaaatgattggcgtcctgagggagattcagcctagagctctctctcccccaatccctccctccggctgaggaaactaacaaaggaaaaaaaaattgcggaaagcaggatttagaggaagcaaattccactggtgcccttggctgccgggaacgtggactagagagtctgcggcgcagccccgagcccagcgcttcccgcgcgtcttaggccggcgggcccgggcgggggaaggggacgcagaccgcggaccctaagacacctgctgtaccctccacccccaccccaccccacccacctccccccaactccctagatgtgtcgtgggcggctgaacgtcgcccgtttaaggggcgggccccggctccacgtgctttctgctgagtgactgaactacataaacagaggccgggaagggggcggggaggagggagagcacaggctttgaccgatagtaacctctgcgctcggtgcagccgaatctataaaaggaactagtcccggcaaaaacccc

SEQ ID NO: 140 - DNA, 2893 bp, Homo sapiens
acagggcatggtggcaggtgcctgtaatctcagttactcgggaggtggaggttgcaatgagcccagatcgcaccattgcactccagcctgggcaacaaaaggtgaaactccatctcaattaaaaaaaaaagaatgattttggtggtcgacttcaaataggtaggagaagaaggagagaggagatggagggtcagggagatctaattactctctaaaatcatgctaggaaagataacaccttttaataacactctctgcttttataacatcattctgccaaggagctcaaaggtttcaacaaagttcactttcagaaaacccctttgaggaagacagaatatacatcttctctccattttaaagatgaagaaacaggccgggcacaatggctaatgcctgtaatcccagcactttgggaggctgaggccagaggatcgcttgagctccagagtttgagaccagcctggataacatggcaaaaccctgtctctacaaaaaaaatacaaaaattagatgggtgtggtggcatgcacctgtggtcccagctacttgggaggctaaggtgggaggatcgcttgagcccagggagtcaagtctacactgagccatgattggatcactgcactccagcctgggtagacagagcaagaccctgtctcaaaaaaaagaaatgaaagagaaagaaagaaagaggagaggagaggagatgaggggaggagggagggggggaggaaggaaggaaggaaggaaggaaaaaaagatgaaaaaagaaaaaaacaagatgaaacagaggcagaaagactttacgtaaattgctcatcatgtggttgtcaagtttgaccccaaaacccaatttattgaccaaggttattctttgactgaggcaagggggtccgctctcctgggccttgggctttagaaagctcatctctggcctttctgagatccatccctttctttttatttttcttgacacggagtcttgctctgtcactcaggctggagtgcagtggcatgatctcgactcactgtaacctctgcctcccgggttcaagcgattctcctgcctcagcctcctgagataacaggcgctcgccaccacatctggctaatttttgtatttttagtaaagactgggtttcatcatgttggccaggttggtttcgaactcctgacctgaggtgagctgcccaccttggcctcccaaagtgctgggattacaggcatgagccactgcgcccagctcagatccatccctttctaagggcaaacagtccatggtgcaaaggggccatgccacccagagttatgagtacctgggactccagaattccttgcctggtggcctccacatgcacttccagggcctgcttgggcctcttctatgcgtctgtcctgagtgttgatagaaccactgatgtgagtacctgggcttgagccgtggcctggagatcctgttgactgtagcatggagggggcttgtgcagctgaatgtctgcatgcaggtggtgggagttctggaatatgatggagctggaggtgggaagagaagtaggcttggggcagctctctcatgccacctcattctggccaaaactcaggtcaaactgtgaagagtctaaatgtgaatctgcccttcaaggtggctacaaaggtatctttgtcaaggtaggagaccttgtggcctccacgtgcacttccagggcctgcttgggcctcttctacgggtctgtcctgagtcttctatgaatccttcagggcagattcatatttagactcttcacagtttgacctgagttttggccagaataaggtgacatttagtttgttggcttgatggatgacttaaatatttagacatggtgtgtaggcctgcattcctactcttgcctttttttttgcccctccagtgttttgggtagttttgctcccctacagccaaaggcaaacagagaagttggaggtctggagtggctacataattttacacgactgcaattctctggctgcacttcacaaatgtatacaaactaaatacaagtcctgtgtttttatcacagggaggctgatcaatataatgaaattaaaagggggctggtccatattgttctgtgtttttgtttgtttgttttgtttgtttctttttttgtttttgtggcctccttcctctcaatttatgaagagaagcagtaagatgttcctctcgggtcctctgagggacctggggagctcaggctgggaatctccaaggcagtaggtcgcctatcaaaaatcaaagtccaggtttgtggggggaaaacaaaagcagcccattacccagaggactgtccgccttcccctcaccccagcctaggcctttgaaaggaaacaaaagacaagacaaaatgattggcgtcctgagggagattcagcctagagctctctctcccccaatccctccctccggctgaggaaactaacaaaggaaaaaaaaattgcggaaagcaggatttagaggaagcaaattccactggtgcccttggctgccgggaacgtggactagagagtctgcggcgcagccccgagcccagcgcttcccgcgcgtcttaggccggcgggcccgggcgggggaaggggacgcagaccgcggaccctaagacacctgctgtaccctccacccccaccccaccccacccacctccccccaactccctagatgtgtcgtgggcggctgaacgtcgcccgtttaaggggcgggccccggctccacgtgctttctgctgagtgactgaactacataaacagaggccgggaagggggcggggaggagggagagcacaggctttgaccgatagtaacctctgcgctcggtgcagccgaatctataaaaggaactagtcccggcaaaaacccc

SEQ ID NO: 141 - DNA, 2893 bp, Homo sapiens
acagggcatggtggcaggtgcctgtaatctcagttactcgggaggtggaggttgcaatgagcccagatcgcaccattgcactccagcctgggcaacaaaaggtgaaactccatctcaattaaaaaaaaaagaatgattttggtggtcgacttcaaataggtaggagaagaaggagagaggagatggagggtcagggagatctaattactctctaaaatcatgctaggaaagataacaccttttaataacactctctgcttttataacatcattctgccaaggagctcaaaggtttcaacaaagttcactttcagaaaacccctttgaggaagacagaatatacatcttctctccattttaaagatgaagaaacaggccgggcacaatggctaatgcctgtaatcccagcactttgggaggctgaggccagaggatcgcttgagctccagagtttgagaccagcctggataacatggcaaaaccctgtctctacaaaaaaaatacaaaaattagatgggtgtggtggcatgcacctgtggtcccagctacttgggaggctaaggtgggaggatcgcttgagcccagggagtcaagtctacactgagccatgattggatcactgcactccagcctgggtagacagagcaagaccctgtctcaaaaaaaagaaatgaaagagaaagaaagaaagaggagaggagaggagatgaggggaggagggagggggggaggaaggaaggaaggaaggaaggaaaaaaagatgaaaaaagaaaaaaacaagatgaaacagaggcagaaagactttacgtaaattgctcatcatgtggttgtcaagtttgaccccaaaacccaatttattgaccaaggttattctttgactgaggcaagggggtccgctctcctgggccttgggctttagaaagctcatctctggcctttctgagatccatccctttctttttatttttcttgacacggagtcttgctctgtcactcaggctggagtgcagtggcatgatctcgactcactgtaacctctgcctcccgggttcaagcgattctcctgcctcagcctcctgagataacaggcgcccgccaccacatctggctaatttttgtatttttagtaaagactgggtttcatcatgttggccaggttggtttcgaactcctgacctgaggtgagctgcccaccttggcctcccaaagtgctgggattacaggcatgagccactgcgcccggctcagatccatccctttctaagggcaaacagtccatggtgcaaaggggccatgccacccagagttatgagtacctgggactccagaattccttgcctggtggcctccacatgcacttccagggcctgcttgggcctcttctatgcgtctgtcctgagtgttgatagaaccactgatgtgagtacctgggcttgagccgtggcctggagatcctgttgactgtagcatggagggggcttgtgcagctgaatgtctgcatgcaggtggtgggagttctggaatatgatggagctggaggtgggaagagaagtaggcttggggcagctctctcatgccacctcattctggccaaaactcaggtcaaactgtgaagagtctaaatgtgaatctgcccttcaaggtggctacaaaggtatctttgtcaaggtaggagaccttgtggcctccacgtgcacttccagggcctgcttgggcctcttctacgggtctgtcctgagtcttctatgaatccttcagggcagattcatatttagactcttcacagtttgacctgagttttggccagaataaggtgacatttagtttgttggcttgatggatgacttaaatatttagacatggtgtgtaggcctgcattcctactcttgcctttttttttgcccctccagtgttttgggtagttttgctcccctacagccaaaggcaaacagagaagttggaggtctggagtggctacataattttacacgactgcaattctctggctgcacttcacaaatgtatacaaactaaatacaagtcctgtgtttttatcacagggaggctgatcaatataatgaaattaaaagggggctggtccatattgttctgtgtttttgtttgtttgttttgtttgtttctttttttgtttttgtggcctccttcctctcaatttatgaagagaagcagtaagatgttcctctcgggtcctctgagggacctggggagctcaggctgggaatctccaaggcagtaggtcgcctatcaaaaatcaaagtccaggtttgtggggggaaaacaaaagcagcccattacccagaggactgtccgccttcccctcaccccagcctaggcctttgaaaggaaacaaaagacaagacaaaatgattggcgtcctgagggagattcagcctagagctctctctcccccaatccctccctccggctgaggaaactaacaaaggaaaaaaaaattgcggaaagcaggatttagaggaagcaaattccactggtgcccttggctgccgggaacgtggactagagagtctgcggcgcagccccgagcccagcgcttcccgcgcgtcttaggccggcgggcccgggcgggggaaggggacgcagaccgcggaccctaagacacctgctgtaccctccacccccaccccaccccacccacctccccccaactccctagatgtgtcgtgggcggctgaacgtcgcccgtttaaggggcgggccccggctccacgtgctttctgctgagtgactgaactacataaacagaggccgggaagggggcggggaggagggagagcacaggctttgaccgatagtaacctctgcgctcggtgcagccgaatctataaaaggaactagtcccggcaaaaacccc

SEQ ID NO: 142 - DNA, 2893 bp, Homo sapiens
acagggcatggtggcaggtgcctgtaatctcagttactcgggaggtggaggttgcaatgagcccagatcgcaccattgcactccagcctgggcaacaaaaggtgaaactccatctcaattaaaaaaaaaagaatgattttggtggtcgacttcaaataggtaggagaagaaggagagaggagatggagggtcagggagatctaattactctctaaaatcatgctaggaaagataacaccttttaataacactctctgcttttataacatcattctgccaaggagctcaaaggtttcaacaaagttcactttcagaaaacccctttgaggaagacagaatatacatcttctctccattttaaagatgaagaaacaggccgggcacaatggctaatgcctgtaatcccagcactttgggaggctgaggccagaggatcgcttgagctccagagtttgagaccagcctggataacatggcaaaaccctgtctctacaaaaaaaatacaaaaattagatgggtgtggtggcatgcacctgtggtcccagctacttgggaggctaaggtgggaggatcgcttgagcccagggagtcaagtctacactgagccatgattggatcactgcactccagcctgggtagacagagcaagaccctgtctcaaaaaaaagaaatgaaagagaaagaaagaaagaggagaggagaggagatgaggggaggagggagggggggaggaaggaaggaaggaaggaaggaaaaaaagatgaaaaaagaaaaaaacaagatgaaacagaggcagaaagactttacgtaaattgctcatcatgtggttgtcaagtttgaccccaaaacccaatttattgaccaaggttattctttgactgaggcaagggggtccgctctcctgggccttgggctttagaaagctcatctctggcctttctgagatccatccctttctttttatttttcttgacacggagtcttgctctgtcactcaggctggagtgcagtggcatgatctcgactcactgtaacctctgcctcccgggttcaagcgattctcctgcctcagcctcctgagataacaggcgcccgccaccacatctggctaatttttgtatttttagtaaagactgggtttcatcatgttggccaggttggtttcgaactcctgacctgaggtgagctgcccaccttggcctcccaaagtgctgggattacaggcatgagccactgcgcccagctcagatccatccctttctaagggcaaacagtccatggtgcaaaggggccatgccacccagagttatgagtacctgggactccagaattccttgcctggtggcctccacatgcacttccagggcctgcttgggcctcttctatgggtctgtcctgagtgttgatagaaccactgatgtgagtacctgggcttgagccgtggcctggagatcctgttgactgtagcatggagggggcttgtgcagctgaatgtctgcatgcaggtggtgggagttctggaatatgatggagctggaggtgggaagagaagtaggcttggggcagctctctcatgccacctcattctggccaaaactcaggtcaaactgtgaagagtctaaatgtgaatctgcccttcaaggtggctacaaaggtatctttgtcaaggtaggagaccttgtggcctccacgtgcacttccagggcctgcttgggcctcttctacgggtctgtcctgagtcttctatgaatccttcagggcagattcatatttagactcttcacagtttgacctgagttttggccagaataaggtgacatttagtttgttggcttgatggatgacttaaatatttagacatggtgtgtaggcctgcattcctactcttgcctttttttttgcccctccagtgttttgggtagttttgctcccctacagccaaaggcaaacagagaagttggaggtctggagtggctacataattttacacgactgcaattctctggctgcacttcacaaatgtatacaaactaaatacaagtcctgtgtttttatcacagggaggctgatcaatataatgaaattaaaagggggctggtccatattgttctgtgtttttgtttgtttgttttgtttgtttctttttttgtttttgtggcctccttcctctcaatttatgaagagaagcagtaagatgttcctctcgggtcctctgagggacctggggagctcaggctgggaatctccaaggcagtaggtcgcctatcaaaaatcaaagtccaggtttgtggggggaaaacaaaagcagcccattacccagaggactgtccgccttcccctcaccccagcctaggcctttgaaaggaaacaaaagacaagacaaaatgattggcgtcctgagggagattcagcctagagctctctctcccccaatccctccctccggctgaggaaactaacaaaggaaaaaaaaattgcggaaagcaggatttagaggaagcaaattccactggtgcccttggctgccgggaacgtggactagagagtctgcggcgcagccccgagcccagcgcttcccgcgcgtcttaggccggcgggcccgggcgggggaaggggacgcagaccgcggaccctaagacacctgctgtaccctccacccccaccccaccccacccacctccccccaactccctagatgtgtcgtgggcggctgaacgtcgcccgtttaaggggcgggccccggctccacgtgctttctgctgagtgactgaactacataaacagaggccgggaagggggcggggaggagggagagcacaggctttgaccgatagtaacctctgcgctcggtgcagccgaatctataaaaggaactagtcccggcaaaaacccc

SEQ ID NO: 143 - DNA, 2893 bp, Homo sapiens
acagggcatggtggcaggtgcctgtaatctcagttactcgggaggtggaggttgcaatgagcccagatcgcaccattgcactccagcctgggcaacaaaaggtgaaactccatctcaattaaaaaaaaaagaatgattttggtggtcgacttcaaataggtaggagaagaaggagagaggagatggagggtcagggagatctaattactctctaaaatcatgctaggaaagataacaccttttaataacactctctgcttttataacatcattctgccaaggagctcaaaggtttcaacaaagttcactttcagaaaacccctttgaggaagacagaatatacatcttctctccattttaaagatgaagaaacaggccgggcacaatggctaatgcctgtaatcccagcactttgggaggctgaggccagaggatcgcttgagctccagagtttgagaccagcctggataacatggcaaaaccctgtctctacaaaaaaaatacaaaaattagatgggtgtggtggcatgcacctgtggtcccagctacttgggaggctaaggtgggaggatcgcttgagcccagggagtcaagtctacactgagccatgattggatcactgcactccagcctgggtagacagagcaagaccctgtctcaaaaaaaagaaatgaaagagaaagaaagaaagaggagaggagaggagatgaggggaggagggagggggggaggaaggaaggaaggaaggaaggaaaaaaagatgaaaaaagaaaaaaacaagatgaaacagaggcagaaagactttacgtaaattgctcatcatgtggttgtcaagtttgaccccaaaacccaatttattgaccaaggttattctttgactgaggcaagggggtccgctctcctgggccttgggctttagaaagctcatctctggcctttctgagatccatccctttctttttatttttcttgacacggagtcttgctctgtcactcaggctggagtgcagtggcatgatctcgactcactgtaacctctgcctcccgggttcaagcgattctcctgcctcagcctcctgagataacaggcgcccgccaccacatctggctaatttttgtatttttagtaaagactgggtttcatcatgttggccaggttggtttcgaactcctgacctgaggtgagctgcccaccttggcctcccaaagtgctgggattacaggcatgagccactgcgcccagctcagatccatccctttctaagggcaaacagtccatggtgcaaaggggccatgccacccagagttatgagtacctgggactccagaattccttgcctggtggcctccacatgcacttccagggcctgcttgggcctcttctatgcgtctgtcctgagtgttgatagaaccactgatgtgagtacctgggcttgagccgtggcctggagatcctgttgactgtagcatggagggggcttgtgcagctgaatgtctgtatgcaggtggtgggagttctggaatatgatggagctggaggtgggaagagaagtaggcttggggcagctctctcatgccacctcattctggccaaaactcaggtcaaactgtgaagagtctaaatgtgaatctgcccttcaaggtggctacaaaggtatctttgtcaaggtaggagaccttgtggcctccacgtgcacttccagggcctgcttgggcctcttctacgggtctgtcctgagtcttctatgaatccttcagggcagattcatatttagactcttcacagtttgacctgagttttggccagaataaggtgacatttagtttgttggcttgatggatgacttaaatatttagacatggtgtgtaggcctgcattcctactcttgcctttttttttgcccctccagtgttttgggtagttttgctcccctacagccaaaggcaaacagagaagttggaggtctggagtggctacataattttacacgactgcaattctctggctgcacttcacaaatgtatacaaactaaatacaagtcctgtgtttttatcacagggaggctgatcaatataatgaaattaaaagggggctggtccatattgttctgtgtttttgtttgtttgttttgtttgtttctttttttgtttttgtggcctccttcctctcaatttatgaagagaagcagtaagatgttcctctcgggtcctctgagggacctggggagctcaggctgggaatctccaaggcagtaggtcgcctatcaaaaatcaaagtccaggtttgtggggggaaaacaaaagcagcccattacccagaggactgtccgccttcccctcaccccagcctaggcctttgaaaggaaacaaaagacaagacaaaatgattggcgtcctgagggagattcagcctagagctctctctcccccaatccctccctccggctgaggaaactaacaaaggaaaaaaaaattgcggaaagcaggatttagaggaagcaaattccactggtgcccttggctgccgggaacgtggactagagagtctgcggcgcagccccgagcccagcgcttcccgcgcgtcttaggccggcgggcccgggcgggggaaggggacgcagaccgcggaccctaagacacctgctgtaccctccacccccaccccaccccacccacctccccccaactccctagatgtgtcgtgggcggctgaacgtcgcccgtttaaggggcgggccccggctccacgtgctttctgctgagtgactgaactacataaacagaggccgggaagggggcggggaggagggagagcacaggctttgaccgatagtaacctctgcgctcggtgcagccgaatctataaaaggaactagtcccggcaaaaacccc

SEQ ID NO: 144 - DNA, 2893 bp, Homo sapiens
acagggcatggtggcaggtgcctgtaatctcagttactcgggaggtggaggttgcaatgagcccagatcgcaccattgcactccagcctgggcaacaaaaggtgaaactccatctcaattaaaaaaaaaagaatgattttggtggtcgacttcaaataggtaggagaagaaggagagaggagatggagggtcagggagatctaattactctctaaaatcatgctaggaaagataacaccttttaataacactctctgcttttataacatcattctgccaaggagctcaaaggtttcaacaaagttcactttcagaaaacccctttgaggaagacagaatatacatcttctctccattttaaagatgaagaaacaggccgggcacaatggctaatgcctgtaatcccagcactttgggaggctgaggccagaggatcgcttgagctccagagtttgagaccagcctggataacatggcaaaaccctgtctctacaaaaaaaatacaaaaattagatgggtgtggtggcatgcacctgtggtcccagctacttgggaggctaaggtgggaggatcgcttgagcccagggagtcaagtctacactgagccatgattggatcactgcactccagcctgggtagacagagcaagaccctgtctcaaaaaaaagaaatgaaagagaaagaaagaaagaggagaggagaggagatgaggggaggagggagggggggaggaaggaaggaaggaaggaaggaaaaaaagatgaaaaaagaaaaaaacaagatgaaacagaggcagaaagactttacgtaaattgctcatcatgtggttgtcaagtttgaccccaaaacccaatttattgaccaaggttattctttgactgaggcaagggggtccgctctcctgggccttgggctttagaaagctcatctctggcctttctgagatccatccctttctttttatttttcttgacacggagtcttgctctgtcactcaggctggagtgcagtggcatgatctcgactcactgtaacctctgcctcccgggttcaagcgattctcctgcctcagcctcctgagataacaggcgcccgccaccacatctggctaatttttgtatttttagtaaagactgggtttcatcatgttggccaggttggtttcgaactcctgacctgaggtgagctgcccaccttggcctcccaaagtgctgggattacaggcatgagccactgcgcccagctcagatccatccctttctaagggcaaacagtccatggtgcaaaggggccatgccacccagagttatgagtacctgggactccagaattccttgcctggtggcctccacatgcacttccagggcctgcttgggcctcttctatgcgtctgtcctgagtgttgatagaaccactgatgtgagtacctgggcttgagccgtggcctggagatcctgttgactgtagcatggagggggcttgtgcagctgaatgtctgcatgcaggtggtgggagttctggaatatgatggagctggaggtgggaagagaagtaggcttggggcagctctctcatgccacctcattctggccaaaactcaggtcaaactgtgaagagtctaaatgtgaatctgcccttcaaagtggctacaaaggtatctttgtcaaggtaggagaccttgtggcctccacgtgcacttccagggcctgcttgggcctcttctacgggtctgtcctgagtcttctatgaatccttcagggcagattcatatttagactcttcacagtttgacctgagttttggccagaataaggtgacatttagtttgttggcttgatggatgacttaaatatttagacatggtgtgtaggcctgcattcctactcttgcctttttttttgcccctccagtgttttgggtagttttgctcccctacagccaaaggcaaacagagaagttggaggtctggagtggctacataattttacacgactgcaattctctggctgcacttcacaaatgtatacaaactaaatacaagtcctgtgtttttatcacagggaggctgatcaatataatgaaattaaaagggggctggtccatattgttctgtgtttttgtttgtttgttttgtttgtttctttttttgtttttgtggcctccttcctctcaatttatgaagagaagcagtaagatgttcctctcgggtcctctgagggacctggggagctcaggctgggaatctccaaggcagtaggtcgcctatcaaaaatcaaagtccaggtttgtggggggaaaacaaaagcagcccattacccagaggactgtccgccttcccctcaccccagcctaggcctttgaaaggaaacaaaagacaagacaaaatgattggcgtcctgagggagattcagcctagagctctctctcccccaatccctccctccggctgaggaaactaacaaaggaaaaaaaaattgcggaaagcaggatttagaggaagcaaattccactggtgcccttggctgccgggaacgtggactagagagtctgcggcgcagccccgagcccagcgcttcccgcgcgtcttaggccggcgggcccgggcgggggaaggggacgcagaccgcggaccctaagacacctgctgtaccctccacccccaccccaccccacccacctccccccaactccctagatgtgtcgtgggcggctgaacgtcgcccgtttaaggggcgggccccggctccacgtgctttctgctgagtgactgaactacataaacagaggccgggaagggggcggggaggagggagagcacaggctttgaccgatagtaacctctgcgctcggtgcagccgaatctataaaaggaactagtcccggcaaaaacccc

SEQ ID NO: 145 - DNA, 2893 bp, Homo sapiens
acagggcatggtggcaggtgcctgtaatctcagttactcgggaggtggaggttgcaatgagcccagatcgcaccattgcactccagcctgggcaacaaaaggtgaaactccatctcaattaaaaaaaaaagaatgattttggtggtcgacttcaaataggtaggagaagaaggagagaggagatggagggtcagggagatctaattactctctaaaatcatgctaggaaagataacaccttttaataacactctctgcttttataacatcattctgccaaggagctcaaaggtttcaacaaagttcactttcagaaaacccctttgaggaagacagaatatacatcttctctccattttaaagatgaagaaacaggccgggcacaatggctaatgcctgtaatcccagcactttgggaggctgaggccagaggatcgcttgagctccagagtttgagaccagcctggataacatggcaaaaccctgtctctacaaaaaaaatacaaaaattagatgggtgtggtggcatgcacctgtggtcccagctacttgggaggctaaggtgggaggatcgcttgagcccagggagtcaagtctacactgagccatgattggatcactgcactccagcctgggtagacagagcaagaccctgtctcaaaaaaaagaaatgaaagagaaagaaagaaagaggagaggagaggagatgaggggaggagggagggggggaggaaggaaggaaggaaggaaggaaaaaaagatgaaaaaagaaaaaaacaagatgaaacagaggcagaaagactttacgtaaattgctcatcatgtggttgtcaagtttgaccccaaaacccaatttattgaccaaggttattctttgactgaggcaagggggtccgctctcctgggccttgggctttagaaagctcatctctggcctttctgagatccatccctttctttttatttttcttgacacggagtcttgctctgtcactcaggctggagtgcagtggcatgatctcgactcactgtaacctctgcctcccgggttcaagcgattctcctgcctcagcctcctgagataacaggcgcccgccaccacatctggctaatttttgtatttttagtaaagactgggtttcatcatgttggccaggttggtttcgaactcctgacctgaggtgagctgcccaccttggcctcccaaagtgctgggattacaggcatgagccactgcgcccagctcagatccatccctttctaagggcaaacagtccatggtgcaaaggggccatgccacccagagttatgagtacctgggactccagaattccttgcctggtggcctccacatgcacttccagggcctgcttgggcctcttctatgcgtctgtcctgagtgttgatagaaccactgatgtgagtacctgggcttgagccgtggcctggagatcctgttgactgtagcatggagggggcttgtgcagctgaatgtctgcatgcaggtggtgggagttctggaatatgatggagctggaggtgggaagagaagtaggcttggggcagctctctcatgccacctcattctggccaaaactcaggtcaaactgtgaagagtctaaatgtgaatctgcccttcaaggtggctacaaaggtatctttgtcaaggtaggagatcttgtggcctccacgtgcacttccagggcctgcttgggcctcttctacgggtctgtcctgagtcttctatgaatccttcagggcagattcatatttagactcttcacagtttgacctgagttttggccagaataaggtgacatttagtttgttggcttgatggatgacttaaatatttagacatggtgtgtaggcctgcattcctactcttgcctttttttttgcccctccagtgttttgggtagttttgctcccctacagccaaaggcaaacagagaagttggaggtctggagtggctacataattttacacgactgcaattctctggctgcacttcacaaatgtatacaaactaaatacaagtcctgtgtttttatcacagggaggctgatcaatataatgaaattaaaagggggctggtccatattgttctgtgtttttgtttgtttgttttgtttgtttctttttttgtttttgtggcctccttcctctcaatttatgaagagaagcagtaagatgttcctctcgggtcctctgagggacctggggagctcaggctgggaatctccaaggcagtaggtcgcctatcaaaaatcaaagtccaggtttgtggggggaaaacaaaagcagcccattacccagaggactgtccgccttcccctcaccccagcctaggcctttgaaaggaaacaaaagacaagacaaaatgattggcgtcctgagggagattcagcctagagctctctctcccccaatccctccctccggctgaggaaactaacaaaggaaaaaaaaattgcggaaagcaggatttagaggaagcaaattccactggtgcccttggctgccgggaacgtggactagagagtctgcggcgcagccccgagcccagcgcttcccgcgcgtcttaggccggcgggcccgggcgggggaaggggacgcagaccgcggaccctaagacacctgctgtaccctccacccccaccccaccccacccacctccccccaactccctagatgtgtcgtgggcggctgaacgtcgcccgtttaaggggcgggccccggctccacgtgctttctgctgagtgactgaactacataaacagaggccgggaagggggcggggaggagggagagcacaggctttgaccgatagtaacctctgcgctcggtgcagccgaatctataaaaggaactagtcccggcaaaaacccc

SEQ ID NO: 146 - DNA, 2893 bp, Homo sapiens
acagggcatggtggcaggtgcctgtaatctcagttactcgggaggtggaggttgcaatgagcccagatcgcaccattgcactccagcctgggcaacaaaaggtgaaactccatctcaattaaaaaaaaaagaatgattttggtggtcgacttcaaataggtaggagaagaaggagagaggagatggagggtcagggagatctaattactctctaaaatcatgctaggaaagataacaccttttaataacactctctgcttttataacatcattctgccaaggagctcaaaggtttcaacaaagttcactttcagaaaacccctttgaggaagacagaatatacatcttctctccattttaaagatgaagaaacaggccgggcacaatggctaatgcctgtaatcccagcactttgggaggctgaggccagaggatcgcttgagctccagagtttgagaccagcctggataacatggcaaaaccctgtctctacaaaaaaaatacaaaaattagatgggtgtggtggcatgcacctgtggtcccagctacttgggaggctaaggtgggaggatcgcttgagcccagggagtcaagtctacactgagccatgattggatcactgcactccagcctgggtagacagagcaagaccctgtctcaaaaaaaagaaatgaaagagaaagaaagaaagaggagaggagaggagatgaggggaggagggagggggggaggaaggaaggaaggaaggaaggaaaaaaagatgaaaaaagaaaaaaacaagatgaaacagaggcagaaagactttacgtaaattgctcatcatgtggttgtcaagtttgaccccaaaacccaatttattgaccaaggttattctttgactgaggcaagggggtccgctctcctgggccttgggctttagaaagctcatctctggcctttctgagatccatccctttctttttatttttcttgacacggagtcttgctctgtcactcaggctggagtgcagtggcatgatctcgactcactgtaacctctgcctcccgggttcaagcgattctcctgcctcagcctcctgagataacaggcgcccgccaccacatctggctaatttttgtatttttagtaaagactgggtttcatcatgttggccaggttggtttcgaactcctgacctgaggtgagctgcccaccttggcctcccaaagtgctgggattacaggcatgagccactgcgcccagctcagatccatccctttctaagggcaaacagtccatggtgcaaaggggccatgccacccagagttatgagtacctgggactccagaattccttgcctggtggcctccacatgcacttccagggcctgcttgggcctcttctatgcgtctgtcctgagtgttgatagaaccactgatgtgagtacctgggcttgagccgtggcctggagatcctgttgactgtagcatggagggggcttgtgcagctgaatgtctgcatgcaggtggtgggagttctggaatatgatggagctggaggtgggaagagaagtaggcttggggcagctctctcatgccacctcattctggccaaaactcaggtcaaactgtgaagagtctaaatgtgaatctgcccttcaaggtggctacaaaggtatctttgtcaaggtaggagaccttgtggcctccacgtgcacttccagggcctgcttgggcctcttctacgggtctgtcctgagtcttctatgaatccttcagggcagattcatatttagactcttcacagtttgaccttagttttggccagaataaggtgacatttagtttgttggcttgatggatgacttaaatatttagacatggtgtgtaggcctgcattcctactcttgcctttttttttgcccctccagtgttttgggtagttttgctcccctacagccaaaggcaaacagagaagttggaggtctggagtggctacataattttacacgactgcaattctctggctgcacttcacaaatgtatacaaactaaatacaagtcctgtgtttttatcacagggaggctgatcaatataatgaaattaaaagggggctggtccatattgttctgtgtttttgtttgtttgttttgtttgtttctttttttgtttttgtggcctccttcctctcaatttatgaagagaagcagtaagatgttcctctcgggtcctctgagggacctggggagctcaggctgggaatctccaaggcagtaggtcgcctatcaaaaatcaaagtccaggtttgtggggggaaaacaaaagcagcccattacccagaggactgtccgccttcccctcaccccagcctaggcctttgaaaggaaacaaaagacaagacaaaatgattggcgtcctgagggagattcagcctagagctctctctcccccaatccctccctccggctgaggaaactaacaaaggaaaaaaaaattgcggaaagcaggatttagaggaagcaaattccactggtgcccttggctgccgggaacgtggactagagagtctgcggcgcagccccgagcccagcgcttcccgcgcgtcttaggccggcgggcccgggcgggggaaggggacgcagaccgcggaccctaagacacctgctgtaccctccacccccaccccaccccacccacctccccccaactccctagatgtgtcgtgggcggctgaacgtcgcccgtttaaggggcgggccccggctccacgtgctttctgctgagtgactgaactacataaacagaggccgggaagggggcggggaggagggagagcacaggctttgaccgatagtaacctctgcgctcggtgcagccgaatctataaaaggaactagtcccggcaaaaacccc

SEQ ID NO: 147 - DNA, 2895 bp, Homo sapiens
acagggcatggtggcaggtgcctgtaatctcagttactcgggaggtggaggttgcaatgagcccagatcgcaccattgcactccagcctgggcaacaaaaggtgaaactccatctcaattaaaaaaaaaagaatgattttggtggtcgacttcaaataggtaggagaagaaggagagaggagatggagggtcagggagatctaattactctctaaaatcatgctaggaaagataacaccttttaataacactctctgcttttataacatcattctgccaaggagctcaaaggtttcaacaaagttcactttcagaaaacccctttgaggaagacagaatatacatcttctctccattttaaagatgaagaaacaggccgggcacaatggctaatgcctgtaatcccagcactttgggaggctgaggccagaggatcgcttgagctccagagtttgagaccagcctggataacatggcaaaaccctgtctctacaaaaaaaatacaaaaattagatgggtgtggtggcatgcacctgtggtcccagctacttgggaggctaaggtgggaggatcgcttgagcccagggagtcaagtctacactgagccatgattggatcactgcactccagcctgggtagacagagcaagaccctgtctcaaaaaaaagaaatgaaagagaaagaaagaaagaggagaggagaggagatgaggggaggagggagggggggaggaaggaaggaaggaaggaaggaaaaaaagatgaaaaaagaaaaaaacaagatgaaacagaggcagaaagactttacgtaaattgctcatcatgtggttgtcaagtttgaccccaaaacccaatttattgaccaaggttattctttgactgaggcaagggggtccgctctcctgggccttgggctttagaaagctcatctctggcctttctgagatccatccctttctttttatttttcttgacacggagtcttgctctgtcactcaggctggagtgcagtggcatgatctcgactcactgtaacctctgcctcccgggttcaagcgattctcctgcctcagcctcctgagataacaggcgcccgccaccacatctggctaatttttgtatttttagtaaagactgggtttcatcatgttggccaggttggtttcgaactcctgacctgaggtgagctgcccaccttggcctcccaaagtgctgggattacaggcatgagccactgcgcccagctcagatccatccctttctaagggcaaacagtccatggtgcaaaggggccatgccacccagagttatgagtacctgggactccagaattccttgcctggtggcctccacatgcacttccagggcctgcttgggcctcttctatgcgtctgtcctgagtgttgatagaaccactgatgtgagtacctgggcttgagccgtggcctggagatcctgttgactgtagcatggagggggcttgtgcagctgaatgtctgcatgcaggtggtgggagttctggaatatgatggagctggaggtgggaagagaagtaggcttggggcagctctctcatgccacctcattctggccaaaactcaggtcaaactgtgaagagtctaaatgtgaatctgcccttcaaggtggctacaaaggtatctttgtcaaggtaggagaccttgtggcctccacgtgcacttccagggcctgcttgggcctcttctacgggtctgtcctgagtcttctatgaatccttcagggcagattcatatttagactcttcacagtttgacctgagttttggccagaataaggtgacatttagtttgttggcttgatggatgacttaaatatttagacatatggtgtgtaggcctgcattcctactcttgcctttttttttgcccctccagtgttttgggtagttttgctcccctacagccaaaggcaaacagagaagttggaggtctggagtggctacataattttacacgactgcaattctctggctgcacttcacaaatgtatacaaactaaatacaagtcctgtgtttttatcacagggaggctgatcaatataatgaaattaaaagggggctggtccatattgttctgtgtttttgtttgtttgttttgtttgtttctttttttgtttttgtggcctccttcctctcaatttatgaagagaagcagtaagatgttcctctcgggtcctctgagggacctggggagctcaggctgggaatctccaaggcagtaggtcgcctatcaaaaatcaaagtccaggtttgtggggggaaaacaaaagcagcccattacccagaggactgtccgccttcccctcaccccagcctaggcctttgaaaggaaacaaaagacaagacaaaatgattggcgtcctgagggagattcagcctagagctctctctcccccaatccctccctccggctgaggaaactaacaaaggaaaaaaaaattgcggaaagcaggatttagaggaagcaaattccactggtgcccttggctgccgggaacgtggactagagagtctgcggcgcagccccgagcccagcgcttcccgcgcgtcttaggccggcgggcccgggcgggggaaggggacgcagaccgcggaccctaagacacctgctgtaccctccacccccaccccaccccacccacctccccccaactccctagatgtgtcgtgggcggctgaacgtcgcccgtttaaggggcgggccccggctccacgtgctttctgctgagtgactgaactacataaacagaggccgggaagggggcggggaggagggagagcacaggctttgaccgatagtaacctctgcgctcggtgcagccgaatctataaaaggaactagtcccggcaaaaacccc

SEQ ID NO: 148 - DNA, 2893 bp, Homo sapiens
acagggcatggtggcaggtgcctgtaatctcagttactcgggaggtggaggttgcaatgagcccagatcgcaccattgcactccagcctgggcaacaaaaggtgaaactccatctcaattaaaaaaaaaagaatgattttggtggtcgacttcaaataggtaggagaagaaggagagaggagatggagggtcagggagatctaattactctctaaaatcatgctaggaaagataacaccttttaataacactctctgcttttataacatcattctgccaaggagctcaaaggtttcaacaaagttcactttcagaaaacccctttgaggaagacagaatatacatcttctctccattttaaagatgaagaaacaggccgggcacaatggctaatgcctgtaatcccagcactttgggaggctgaggccagaggatcgcttgagctccagagtttgagaccagcctggataacatggcaaaaccctgtctctacaaaaaaaatacaaaaattagatgggtgtggtggcatgcacctgtggtcccagctacttgggaggctaaggtgggaggatcgcttgagcccagggagtcaagtctacactgagccatgattggatcactgcactccagcctgggtagacagagcaagaccctgtctcaaaaaaaagaaatgaaagagaaagaaagaaagaggagaggagaggagatgaggggaggagggagggggggaggaaggaaggaaggaaggaaggaaaaaaagatgaaaaaagaaaaaaacaagatgaaacagaggcagaaagactttacgtaaattgctcatcatgtggttgtcaagtttgaccccaaaacccaatttattgaccaaggttattctttgactgaggcaagggggtccgctctcctgggccttgggctttagaaagctcatctctggcctttctgagatccatccctttctttttatttttcttgacacggagtcttgctctgtcactcaggctggagtgcagtggcatgatctcgactcactgtaacctctgcctcccgggttcaagcgattctcctgcctcagcctcctgagataacaggcgcccgccaccacatctggctaatttttgtatttttagtaaagactgggtttcatcatgttggccaggttggtttcgaactcctgacctgaggtgagctgcccaccttggcctcccaaagtgctgggattacaggcatgagccactgcgcccagctcagatccatccctttctaagggcaaacagtccatggtgcaaaggggccatgccacccagagttatgagtacctgggactccagaattccttgcctggtggcctccacatgcacttccagggcctgcttgggcctcttctatgcgtctgtcctgagtgttgatagaaccactgatgtgagtacctgggcttgagccgtggcctggagatcctgttgactgtagcatggagggggcttgtgcagctgaatgtctgcatgcaggtggtgggagttctggaatatgatggagctggaggtgggaagagaagtaggcttggggcagctctctcatgccacctcattctggccaaaactcaggtcaaactgtgaagagtctaaatgtgaatctgcccttcaaggtggctacaaaggtatctttgtcaaggtaggagaccttgtggcctccacgtgcacttccagggcctgcttgggcctcttctacgggtctgtcctgagtcttctatgaatccttcagggcagattcatatttagactcttcacagtttgacctgagttttggccagaataaggtgacatttagtttgttggcttgatggatgacttaaatatttagacatggtgtgtaggcctgcattcctactcttgcctttttttttgcccctccagtgttttgggtagttttgctcccctacagccaaaggcaaacagataagttggaggtctggagtggctacataattttacacgactgcaattctctggctgcacttcacaaatgtatacaaactaaatacaagtcctgtgtttttatcacagggaggctgatcaatataatgaaattaaaagggggctggtccatattgttctgtgtttttgtttgtttgttttgtttgtttctttttttgtttttgtggcctccttcctctcaatttatgaagagaagcagtaagatgttcctctcgggtcctctgagggacctggggagctcaggctgggaatctccaaggcagtaggtcgcctatcaaaaatcaaagtccaggtttgtggggggaaaacaaaagcagcccattacccagaggactgtccgccttcccctcaccccagcctaggcctttgaaaggaaacaaaagacaagacaaaatgattggcgtcctgagggagattcagcctagagctctctctcccccaatccctccctccggctgaggaaactaacaaaggaaaaaaaaattgcggaaagcaggatttagaggaagcaaattccactggtgcccttggctgccgggaacgtggactagagagtctgcggcgcagccccgagcccagcgcttcccgcgcgtcttaggccggcgggcccgggcgggggaaggggacgcagaccgcggaccctaagacacctgctgtaccctccacccccaccccaccccacccacctccccccaactccctagatgtgtcgtgggcggctgaacgtcgcccgtttaaggggcgggccccggctccacgtgctttctgctgagtgactgaactacataaacagaggccgggaagggggcggggaggagggagagcacaggctttgaccgatagtaacctctgcgctcggtgcagccgaatctataaaaggaactagtcccggcaaaaacccc

SEQ ID NO: 149 - DNA, 2893 bp, Homo sapiens
acagggcatggtggcaggtgcctgtaatctcagttactcgggaggtggaggttgcaatgagcccagatcgcaccattgcactccagcctgggcaacaaaaggtgaaactccatctcaattaaaaaaaaaagaatgattttggtggtcgacttcaaataggtaggagaagaaggagagaggagatggagggtcagggagatctaattactctctaaaatcatgctaggaaagataacaccttttaataacactctctgcttttataacatcattctgccaaggagctcaaaggtttcaacaaagttcactttcagaaaacccctttgaggaagacagaatatacatcttctctccattttaaagatgaagaaacaggccgggcacaatggctaatgcctgtaatcccagcactttgggaggctgaggccagaggatcgcttgagctccagagtttgagaccagcctggataacatggcaaaaccctgtctctacaaaaaaaatacaaaaattagatgggtgtggtggcatgcacctgtggtcccagctacttgggaggctaaggtgggaggatcgcttgagcccagggagtcaagtctacactgagccatgattggatcactgcactccagcctgggtagacagagcaagaccctgtctcaaaaaaaagaaatgaaagagaaagaaagaaagaggagaggagaggagatgaggggaggagggagggggggaggaaggaaggaaggaaggaaggaaaaaaagatgaaaaaagaaaaaaacaagatgaaacagaggcagaaagactttacgtaaattgctcatcatgtggttgtcaagtttgaccccaaaacccaatttattgaccaaggttattctttgactgaggcaagggggtccgctctcctgggccttgggctttagaaagctcatctctggcctttctgagatccatccctttctttttatttttcttgacacggagtcttgctctgtcactcaggctggagtgcagtggcatgatctcgactcactgtaacctctgcctcccgggttcaagcgattctcctgcctcagcctcctgagataacaggcgcccgccaccacatctggctaatttttgtatttttagtaaagactgggtttcatcatgttggccaggttggtttcgaactcctgacctgaggtgagctgcccaccttggcctcccaaagtgctgggattacaggcatgagccactgcgcccagctcagatccatccctttctaagggcaaacagtccatggtgcaaaggggccatgccacccagagttatgagtacctgggactccagaattccttgcctggtggcctccacatgcacttccagggcctgcttgggcctcttctatgcgtctgtcctgagtgttgatagaaccactgatgtgagtacctgggcttgagccgtggcctggagatcctgttgactgtagcatggagggggcttgtgcagctgaatgtctgcatgcaggtggtgggagttctggaatatgatggagctggaggtgggaagagaagtaggcttggggcagctctctcatgccacctcattctggccaaaactcaggtcaaactgtgaagagtctaaatgtgaatctgcccttcaaggtggctacaaaggtatctttgtcaaggtaggagaccttgtggcctccacgtgcacttccagggcctgcttgggcctcttctacgggtctgtcctgagtcttctatgaatccttcagggcagattcatatttagactcttcacagtttgacctgagttttggccagaataaggtgacatttagtttgttggcttgatggatgacttaaatatttagacatggtgtgtaggcctgcattcctactcttgcctttttttttgcccctccagtgttttgggtagttttgctcccctacagccaaaggcaaacagagaagttggaggtctggagtggctacataattttacacgactgcaattctctggctgcacttcacaaatgtatacaaactaaatacaagtcctgtgtttttatcacagggaggctgatcaatataatgaaattaaaagagggctggtccatattgttctgtgtttttgtttgtttgttttgtttgtttctttttttgtttttgtggcctccttcctctcaatttatgaagagaagcagtaagatgttcctctcgggtcctctgagggacctggggagctcaggctgggaatctccaaggcagtaggtcgcctatcaaaaatcaaagtccaggtttgtggggggaaaacaaaagcagcccattacccagaggactgtccgccttcccctcaccccagcctaggcctttgaaaggaaacaaaagacaagacaaaatgattggcgtcctgagggagattcagcctagagctctctctcccccaatccctccctccggctgaggaaactaacaaaggaaaaaaaaattgcggaaagcaggatttagaggaagcaaattccactggtgcccttggctgccgggaacgtggactagagagtctgcggcgcagccccgagcccagcgcttcccgcgcgtcttaggccggcgggcccgggcgggggaaggggacgcagaccgcggaccctaagacacctgctgtaccctccacccccaccccaccccacccacctccccccaactccctagatgtgtcgtgggcggctgaacgtcgcccgtttaaggggcgggccccggctccacgtgctttctgctgagtgactgaactacataaacagaggccgggaagggggcggggaggagggagagcacaggctttgaccgatagtaacctctgcgctcggtgcagccgaatctataaaaggaactagtcccggcaaaaacccc

SEQ ID NO: 150 - DNA, 2889 bp, Homo sapiens
acagggcatggtggcaggtgcctgtaatctcagttactcgggaggtggaggttgcaatgagcccagatcgcaccattgcactccagcctgggcaacaaaaggtgaaactccatctcaattaaaaaaaaaagaatgattttggtggtcgacttcaaataggtaggagaagaaggagagaggagatggagggtcagggagatctaattactctctaaaatcatgctaggaaagataacaccttttaataacactctctgcttttataacatcattctgccaaggagctcaaaggtttcaacaaagttcactttcagaaaacccctttgaggaagacagaatatacatcttctctccattttaaagatgaagaaacaggccgggcacaatggctaatgcctgtaatcccagcactttgggaggctgaggccagaggatcgcttgagctccagagtttgagaccagcctggataacatggcaaaaccctgtctctacaaaaaaaatacaaaaattagatgggtgtggtggcatgcacctgtggtcccagctacttgggaggctaaggtgggaggatcgcttgagcccagggagtcaagtctacactgagccatgattggatcactgcactccagcctgggtagacagagcaagaccctgtctcaaaaaaaagaaatgaaagagaaagaaagaaagaggagaggagaggagatgaggggaggagggagggggggaggaaggaaggaaggaaggaaggaaaaaaagatgaaaaaagaaaaaaacaagatgaaacagaggcagaaagactttacgtaaattgctcatcatgtggttgtcaagtttgaccccaaaacccaatttattgaccaaggttattctttgactgaggcaagggggtccgctctcctgggccttgggctttagaaagctcatctctggcctttctgagatccatccctttctttttatttttcttgacacggagtcttgctctgtcactcaggctggagtgcagtggcatgatctcgactcactgtaacctctgcctcccgggttcaagcgattctcctgcctcagcctcctgagataacaggcgcccgccaccacatctggctaatttttgtatttttagtaaagactgggtttcatcatgttggccaggttggtttcgaactcctgacctgaggtgagctgcccaccttggcctcccaaagtgctgggattacaggcatgagccactgcgcccagctcagatccatccctttctaagggcaaacagtccatggtgcaaaggggccatgccacccagagttatgagtacctgggactccagaattccttgcctggtggcctccacatgcacttccagggcctgcttgggcctcttctatgcgtctgtcctgagtgttgatagaaccactgatgtgagtacctgggcttgagccgtggcctggagatcctgttgactgtagcatggagggggcttgtgcagctgaatgtctgcatgcaggtggtgggagttctggaatatgatggagctggaggtgggaagagaagtaggcttggggcagctctctcatgccacctcattctggccaaaactcaggtcaaactgtgaagagtctaaatgtgaatctgcccttcaaggtggctacaaaggtatctttgtcaaggtaggagaccttgtggcctccacgtgcacttccagggcctgcttgggcctcttctacgggtctgtcctgagtcttctatgaatccttcagggcagattcatatttagactcttcacagtttgacctgagttttggccagaataaggtgacatttagtttgttggcttgatggatgacttaaatatttagacatggtgtgtaggcctgcattcctactcttgcctttttttttgcccctccagtgttttgggtagttttgctcccctacagccaaaggcaaacagagaagttggaggtctggagtggctacataattttacacgactgcaattctctggctgcacttcacaaatgtatacaaactaaatacaagtcctgtgtttttatcacagggaggctgatcaatataatgaaattaaaagggggctggtccatattgttctgtgtttttgtttgttttgtttgtttctttttttgtttttgtggcctccttcctctcaatttatgaagagaagcagtaagatgttcctctcgggtcctctgagggacctggggagctcaggctgggaatctccaaggcagtaggtcgcctatcaaaaatcaaagtccaggtttgtggggggaaaacaaaagcagcccattacccagaggactgtccgccttcccctcaccccagcctaggcctttgaaaggaaacaaaagacaagacaaaatgattggcgtcctgagggagattcagcctagagctctctctcccccaatccctccctccggctgaggaaactaacaaaggaaaaaaaaattgcggaaagcaggatttagaggaagcaaattccactggtgcccttggctgccgggaacgtggactagagagtctgcggcgcagccccgagcccagcgcttcccgcgcgtcttaggccggcgggcccgggcgggggaaggggacgcagaccgcggaccctaagacacctgctgtaccctccacccccaccccaccccacccacctccccccaactccctagatgtgtcgtgggcggctgaacgtcgcccgtttaaggggcgggccccggctccacgtgctttctgctgagtgactgaactacataaacagaggccgggaagggggcggggaggagggagagcacaggctttgaccgatagtaacctctgcgctcggtgcagccgaatctataaaaggaactagtcccggcaaaaacccc

SEQ ID NO: 151 - DNA, 2884 bp, Homo sapiens
acagggcatggtggcaggtgcctgtaatctcagttactcgggaggtggaggttgcaatgagcccagatcgcaccattgcactccagcctgggcaacaaaaggtgaaactccatctcaattaaaaaaaaaagaatgattttggtggtcgacttcaaataggtaggagaagaaggagagaggagatggagggtcagggagatctaattactctctaaaatcatgctaggaaagataacaccttttaataacactctctgcttttataacatcattctgccaaggagctcaaaggtttcaacaaagttcactttcagaaaacccctttgaggaagacagaatatacatcttctctccattttaaagatgaagaaacaggccgggcacaatggctaatgcctgtaatcccagcactttgggaggctgaggccagaggatcgcttgagctccagagtttgagaccagcctggataacatggcaaaaccctgtctctacaaaaaaaatacaaaaattagatgggtgtggtggcatgcacctgtggtcccagctacttgggaggctaaggtgggaggatcgcttgagcccagggagtcaagtctacactgagccatgattggatcactgcactccagcctgggtagacagagcaagaccctgtctcaaaaaaaagaaatgaaagagaaagaaagaaagaggagaggagaggagatgaggggaggagggagggggggaggaaggaaggaaggaaggaaggaaaaaaagatgaaaaaagaaaaaaacaagatgaaacagaggcagaaagactttacgtaaattgctcatcatgtggttgtcaagtttgaccccaaaacccaatttattgaccaaggttattctttgactgaggcaagggggtccgctctcctgggccttgggctttagaaagctcatctctggcctttctgagatccatccctttctttttatttttcttgacacggagtcttgctctgtcactcaggctggagtgcagtggcatgatctcgactcactgtaacctctgcctcccgggttcaagcgattctcctgcctcagcctcctgagataacaggcgcccgccaccacatctggctaatttttgtatttttagtaaagactgggtttcatcatgttggccaggttggtttcgaactcctgacctgaggtgagctgcccaccttggcctcccaaagtgctgggattacaggcatgagccactgcgcccagctcagatccatccctttctaagggcaaacagtccatggtgcaaaggggccatgccacccagagttatgagtacctgggactccagaattccttgcctggtggcctccacatgcacttccagggcctgcttgggcctcttctatgcgtctgtcctgagtgttgatagaaccactgatgtgagtacctgggcttgagccgtggcctggagatcctgttgactgtagcatggagggggcttgtgcagctgaatgtctgcatgcaggtggtgggagttctggaatatgatggagctggaggtgggaagagaagtaggcttggggcagctctctcatgccacctcattctggccaaaactcaggtcaaactgtgaagagtctaaatgtgaatctgcccttcaaggtggctacaaaggtatctttgtcaaggtaggagaccttgtggcctccacgtgcacttccagggcctgcttgggcctcttctacgggtctgtcctgagtcttctatgaatccttcagggcagattcatatttagactcttcacagtttgacctgagttttggccagaataaggtgacatttagtttgttggcttgatggatgacttaaatatttagacatggtgtgtaggcctgcattcctactcttgcctttttttttgcccctccagtgttttgggtagttttgctcccctacagccaaaggcaaacagagaagttggaggtctggagtggctacataattttacacgactgcaattctctggctgcacttcacaaatgtatacaaactaaatacaagtcctgtgtttttatcacagggaggctgatcaatataatgaaattaaaagggggctggtccatattgttctgtgtttttgtttgtttgtttctttttttgtttttgtggcctccttcctctcaatttatgaagagaagcagtaagatgttcctctcgggtcctctgagggacctggggagctcaggctgggaatctccaaggcagtaggtcgcctatcaaaaatcaaagtccaggtttgtggggggaaaacaaaagcagcccattacccagaggactgtccgccttcccctcaccccagcctaggcctttgaaaggaaacaaaagacaagacaaaatgattggcgtcctgagggagattcagcctagagctctctctcccccaatccctccctccggctgaggaaactaacaaaggaaaaaaaaattgcggaaagcaggatttagaggaagcaaattccactggtgcccttggctgccgggaacgtggactagagagtctgcggcgcagccccgagcccagcgcttcccgcgcgtcttaggccggcgggcccgggcgggggaaggggacgcagaccgcggaccctaagacacctgctgtaccctccacccccaccccaccccacccacctccccccaactccctagatgtgtcgtgggcggctgaacgtcgcccgtttaaggggcgggccccggctccacgtgctttctgctgagtgactgaactacataaacagaggccgggaagggggcggggaggagggagagcacaggctttgaccgatagtaacctctgcgctcggtgcagccgaatctataaaaggaactagtcccggcaaaaacccc

SEQ ID NO: 152 - DNA, 2893 bp, Homo sapiens
acagggcatggtggcaggtgcctgtaatctcagttactcgggaggtggaggttgcaatgagcccagatcgcaccattgcactccagcctgggcaacaaaaggtgaaactccatctcaattaaaaaaaaaagaatgattttggtggtcgacttcaaataggtaggagaagaaggagagaggagatggagggtcagggagatctaattactctctaaaatcatgctaggaaagataacaccttttaataacactctctgcttttataacatcattctgccaaggagctcaaaggtttcaacaaagttcactttcagaaaacccctttgaggaagacagaatatacatcttctctccattttaaagatgaagaaacaggccgggcacaatggctaatgcctgtaatcccagcactttgggaggctgaggccagaggatcgcttgagctccagagtttgagaccagcctggataacatggcaaaaccctgtctctacaaaaaaaatacaaaaattagatgggtgtggtggcatgcacctgtggtcccagctacttgggaggctaaggtgggaggatcgcttgagcccagggagtcaagtctacactgagccatgattggatcactgcactccagcctgggtagacagagcaagaccctgtctcaaaaaaaagaaatgaaagagaaagaaagaaagaggagaggagaggagatgaggggaggagggagggggggaggaaggaaggaaggaaggaaggaaaaaaagatgaaaaaagaaaaaaacaagatgaaacagaggcagaaagactttacgtaaattgctcatcatgtggttgtcaagtttgaccccaaaacccaatttattgaccaaggttattctttgactgaggcaagggggtccgctctcctgggccttgggctttagaaagctcatctctggcctttctgagatccatccctttctttttatttttcttgacacggagtcttgctctgtcactcaggctggagtgcagtggcatgatctcgactcactgtaacctctgcctcccgggttcaagcgattctcctgcctcagcctcctgagataacaggcgcccgccaccacatctggctaatttttgtatttttagtaaagactgggtttcatcatgttggccaggttggtttcgaactcctgacctgaggtgagctgcccaccttggcctcccaaagtgctgggattacaggcatgagccactgcgcccagctcagatccatccctttctaagggcaaacagtccatggtgcaaaggggccatgccacccagagttatgagtacctgggactccagaattccttgcctggtggcctccacatgcacttccagggcctgcttgggcctcttctatgcgtctgtcctgagtgttgatagaaccactgatgtgagtacctgggcttgagccgtggcctggagatcctgttgactgtagcatggagggggcttgtgcagctgaatgtctgcatgcaggtggtgggagttctggaatatgatggagctggaggtgggaagagaagtaggcttggggcagctctctcatgccacctcattctggccaaaactcaggtcaaactgtgaagagtctaaatgtgaatctgcccttcaaggtggctacaaaggtatctttgtcaaggtaggagaccttgtggcctccacgtgcacttccagggcctgcttgggcctcttctacgggtctgtcctgagtcttctatgaatccttcagggcagattcatatttagactcttcacagtttgacctgagttttggccagaataaggtgacatttagtttgttggcttgatggatgacttaaatatttagacatggtgtgtaggcctgcattcctactcttgcctttttttttgcccctccagtgttttgggtagttttgctcccctacagccaaaggcaaacagagaagttggaggtctggagtggctacataattttacacgactgcaattctctggctgcacttcacaaatgtatacaaactaaatacaagtcctgtgtttttatcacagggaggctgatcaatataatgaaattaaaagggggctggtccatattgttctgtgtttttgtttgtttgttttgtttgtttctttttttgtttttgtggcctccttcctctcaatttatgaagagaagcagtaagatgttcctctcgggtcctctgagggacctggggagctcaggctgggaatctccaaggcagtaggtcgcctatcaaaaatcaaagtccaggtttgtggggggaaaacaaaagcagcccattacccagaggactgtctgccttcccctcaccccagcctaggcctttgaaaggaaacaaaagacaagacaaaatgattggcgtcctgagggagattcagcctagagctctctctcccccaatccctccctccggctgaggaaactaacaaaggaaaaaaaaattgcggaaagcaggatttagaggaagcaaattccactggtgcccttggctgccgggaacgtggactagagagtctgcggcgcagccccgagcccagcgcttcccgcgcgtcttaggccggcgggcccgggcgggggaaggggacgcagaccgcggaccctaagacacctgctgtaccctccacccccaccccaccccacccacctccccccaactccctagatgtgtcgtgggcggctgaacgtcgcccgtttaaggggcgggccccggctccacgtgctttctgctgagtgactgaactacataaacagaggccgggaagggggcggggaggagggagagcacaggctttgaccgatagtaacctctgcgctcggtgcagccgaatctataaaaggaactagtcccggcaaaaacccc

SEQ ID NO: 153 - DNA, 2893 bp, Homo sapiens
acagggcatggtggcaggtgcctgtaatctcagttactcgggaggtggaggttgcaatgagcccagatcgcaccattgcactccagcctgggcaacaaaaggtgaaactccatctcaattaaaaaaaaaagaatgattttggtggtcgacttcaaataggtaggagaagaaggagagaggagatggagggtcagggagatctaattactctctaaaatcatgctaggaaagataacaccttttaataacactctctgcttttataacatcattctgccaaggagctcaaaggtttcaacaaagttcactttcagaaaacccctttgaggaagacagaatatacatcttctctccattttaaagatgaagaaacaggccgggcacaatggctaatgcctgtaatcccagcactttgggaggctgaggccagaggatcgcttgagctccagagtttgagaccagcctggataacatggcaaaaccctgtctctacaaaaaaaatacaaaaattagatgggtgtggtggcatgcacctgtggtcccagctacttgggaggctaaggtgggaggatcgcttgagcccagggagtcaagtctacactgagccatgattggatcactgcactccagcctgggtagacagagcaagaccctgtctcaaaaaaaagaaatgaaagagaaagaaagaaagaggagaggagaggagatgaggggaggagggagggggggaggaaggaaggaaggaaggaaggaaaaaaagatgaaaaaagaaaaaaacaagatgaaacagaggcagaaagactttacgtaaattgctcatcatgtggttgtcaagtttgaccccaaaacccaatttattgaccaaggttattctttgactgaggcaagggggtccgctctcctgggccttgggctttagaaagctcatctctggcctttctgagatccatccctttctttttatttttcttgacacggagtcttgctctgtcactcaggctggagtgcagtggcatgatctcgactcactgtaacctctgcctcccgggttcaagcgattctcctgcctcagcctcctgagataacaggcgcccgccaccacatctggctaatttttgtatttttagtaaagactgggtttcatcatgttggccaggttggtttcgaactcctgacctgaggtgagctgcccaccttggcctcccaaagtgctgggattacaggcatgagccactgcgcccagctcagatccatccctttctaagggcaaacagtccatggtgcaaaggggccatgccacccagagttatgagtacctgggactccagaattccttgcctggtggcctccacatgcacttccagggcctgcttgggcctcttctatgcgtctgtcctgagtgttgatagaaccactgatgtgagtacctgggcttgagccgtggcctggagatcctgttgactgtagcatggagggggcttgtgcagctgaatgtctgcatgcaggtggtgggagttctggaatatgatggagctggaggtgggaagagaagtaggcttggggcagctctctcatgccacctcattctggccaaaactcaggtcaaactgtgaagagtctaaatgtgaatctgcccttcaaggtggctacaaaggtatctttgtcaaggtaggagaccttgtggcctccacgtgcacttccagggcctgcttgggcctcttctacgggtctgtcctgagtcttctatgaatccttcagggcagattcatatttagactcttcacagtttgacctgagttttggccagaataaggtgacatttagtttgttggcttgatggatgacttaaatatttagacatggtgtgtaggcctgcattcctactcttgcctttttttttgcccctccagtgttttgggtagttttgctcccctacagccaaaggcaaacagagaagttggaggtctggagtggctacataattttacacgactgcaattctctggctgcacttcacaaatgtatacaaactaaatacaagtcctgtgtttttatcacagggaggctgatcaatataatgaaattaaaagggggctggtccatattgttctgtgtttttgtttgtttgttttgtttgtttctttttttgtttttgtggcctccttcctctcaatttatgaagagaagcagtaagatgttcctctcgggtcctctgagggacctggggagctcaggctgggaatctccaaggcagtaggtcgcctatcaaaaatcaaagtccaggtttgtggggggaaaacaaaagcagcccattacccagaggactgtccgccttcccctcaccccagcctaggcctttgaaaggaaacaaaagacaagacaaaatgattggcgtcctgagggagattcagcctagagctctctctcccccaatccctccctccggctgaggaaactaacaaaggaaaaaaaaattgcggaaagcacgatttagaggaagcaaattccactggtgcccttggctgccgggaacgtggactagagagtctgcggcgcagccccgagcccagcgcttcccgcgcgtcttaggccggcgggcccgggcgggggaaggggacgcagaccgcggaccctaagacacctgctgtaccctccacccccaccccaccccacccacctccccccaactccctagatgtgtcgtgggcggctgaacgtcgcccgtttaaggggcgggccccggctccacgtgctttctgctgagtgactgaactacataaacagaggccgggaagggggcggggaggagggagagcacaggctttgaccgatagtaacctctgcgctcggtgcagccgaatctataaaaggaactagtcccggcaaaaacccc

SEQ ID NO: 154 - DNA, 2893 bp, Homo sapiens
acagggcatggtggcaggtgcctgtaatctcagttactcgggaggtggaggttgcaatgagcccagatcgcaccattgcactccagcctgggcaacaaaaggtgaaactccatctcaattaaaaaaaaaagaatgattttggtggtcgacttcaaataggtaggagaagaaggagagaggagatggagggtcagggagatctaattactctctaaaatcatgctaggaaagataacaccttttaataacactctctgcttttataacatcattctgccaaggagctcaaaggtttcaacaaagttcactttcagaaaacccctttgaggaagacagaatatacatcttctctccattttaaagatgaagaaacaggccgggcacaatggctaatgcctgtaatcccagcactttgggaggctgaggccagaggatcgcttgagctccagagtttgagaccagcctggataacatggcaaaaccctgtctctacaaaaaaaatacaaaaattagatgggtgtggtggcatgcacctgtggtcccagctacttgggaggctaaggtgggaggatcgcttgagcccagggagtcaagtctacactgagccatgattggatcactgcactccagcctgggtagacagagcaagaccctgtctcaaaaaaaagaaatgaaagagaaagaaagaaagaggagaggagaggagatgaggggaggagggagggggggaggaaggaaggaaggaaggaaggaaaaaaagatgaaaaaagaaaaaaacaagatgaaacagaggcagaaagactttacgtaaattgctcatcatgtggttgtcaagtttgaccccaaaacccaatttattgaccaaggttattctttgactgaggcaagggggtccgctctcctgggccttgggctttagaaagctcatctctggcctttctgagatccatccctttctttttatttttcttgacacggagtcttgctctgtcactcaggctggagtgcagtggcatgatctcgactcactgtaacctctgcctcccgggttcaagcgattctcctgcctcagcctcctgagataacaggcgcccgccaccacatctggctaatttttgtatttttagtaaagactgggtttcatcatgttggccaggttggtttcgaactcctgacctgaggtgagctgcccaccttggcctcccaaagtgctgggattacaggcatgagccactgcgcccagctcagatccatccctttctaagggcaaacagtccatggtgcaaaggggccatgccacccagagttatgagtacctgggactccagaattccttgcctggtggcctccacatgcacttccagggcctgcttgggcctcttctatgcgtctgtcctgagtgttgatagaaccactgatgtgagtacctgggcttgagccgtggcctggagatcctgttgactgtagcatggagggggcttgtgcagctgaatgtctgcatgcaggtggtgggagttctggaatatgatggagctggaggtgggaagagaagtaggcttggggcagctctctcatgccacctcattctggccaaaactcaggtcaaactgtgaagagtctaaatgtgaatctgcccttcaaggtggctacaaaggtatctttgtcaaggtaggagaccttgtggcctccacgtgcacttccagggcctgcttgggcctcttctacgggtctgtcctgagtcttctatgaatccttcagggcagattcatatttagactcttcacagtttgacctgagttttggccagaataaggtgacatttagtttgttggcttgatggatgacttaaatatttagacatggtgtgtaggcctgcattcctactcttgcctttttttttgcccctccagtgttttgggtagttttgctcccctacagccaaaggcaaacagagaagttggaggtctggagtggctacataattttacacgactgcaattctctggctgcacttcacaaatgtatacaaactaaatacaagtcctgtgtttttatcacagggaggctgatcaatataatgaaattaaaagggggctggtccatattgttctgtgtttttgtttgtttgttttgtttgtttctttttttgtttttgtggcctccttcctctcaatttatgaagagaagcagtaagatgttcctctcgggtcctctgagggacctggggagctcaggctgggaatctccaaggcagtaggtcgcctatcaaaaatcaaagtccaggtttgtggggggaaaacaaaagcagcccattacccagaggactgtccgccttcccctcaccccagcctaggcctttgaaaggaaacaaaagacaagacaaaatgattggcgtcctgagggagattcagcctagagctctctctcccccaatccctccctccggctgaggaaactaacaaaggaaaaaaaaattgcggaaagcaggatttagaggaagcaaattccactggtgcccttggctgccgggaacgtggactagagagtctgcggcgcagccccgagcccagcgcttcccgcgcgtcttaggctggcgggcccgggcgggggaaggggacgcagaccgcggaccctaagacacctgctgtaccctccacccccaccccaccccacccacctccccccaactccctagatgtgtcgtgggcggctgaacgtcgcccgtttaaggggcgggccccggctccacgtgctttctgctgagtgactgaactacataaacagaggccgggaagggggcggggaggagggagagcacaggctttgaccgatagtaacctctgcgctcggtgcagccgaatctataaaaggaactagtcccggcaaaaacccc

SEQ ID NO: 155 - DNA, 2893 bp, Homo sapiens
acagggcatggtggcaggtgcctgtaatctcagttactcgggaggtggaggttgcaatgagcccagatcgcaccattgcactccagcctgggcaacaaaaggtgaaactccatctcaattaaaaaaaaaagaatgattttggtggtcgacttcaaataggtaggagaagaaggagagaggagatggagggtcagggagatctaattactctctaaaatcatgctaggaaagataacaccttttaataacactctctgcttttataacatcattctgccaaggagctcaaaggtttcaacaaagttcactttcagaaaacccctttgaggaagacagaatatacatcttctctccattttaaagatgaagaaacaggccgggcacaatggctaatgcctgtaatcccagcactttgggaggctgaggccagaggatcgcttgagctccagagtttgagaccagcctggataacatggcaaaaccctgtctctacaaaaaaaatacaaaaattagatgggtgtggtggcatgcacctgtggtcccagctacttgggaggctaaggtgggaggatcgcttgagcccagggagtcaagtctacactgagccatgattggatcactgcactccagcctgggtagacagagcaagaccctgtctcaaaaaaaagaaatgaaagagaaagaaagaaagaggagaggagaggagatgaggggaggagggagggggggaggaaggaaggaaggaaggaaggaaaaaaagatgaaaaaagaaaaaaacaagatgaaacagaggcagaaagactttacgtaaattgctcatcatgtggttgtcaagtttgaccccaaaacccaatttattgaccaaggttattctttgactgaggcaagggggtccgctctcctgggccttgggctttagaaagctcatctctggcctttctgagatccatccctttctttttatttttcttgacacggagtcttgctctgtcactcaggctggagtgcagtggcatgatctcgactcactgtaacctctgcctcccgggttcaagcgattctcctgcctcagcctcctgagataacaggcgcccgccaccacatctggctaatttttgtatttttagtaaagactgggtttcatcatgttggccaggttggtttcgaactcctgacctgaggtgagctgcccaccttggcctcccaaagtgctgggattacaggcatgagccactgcgcccagctcagatccatccctttctaagggcaaacagtccatggtgcaaaggggccatgccacccagagttatgagtacctgggactccagaattccttgcctggtggcctccacatgcacttccagggcctgcttgggcctcttctatgcgtctgtcctgagtgttgatagaaccactgatgtgagtacctgggcttgagccgtggcctggagatcctgttgactgtagcatggagggggcttgtgcagctgaatgtctgcatgcaggtggtgggagttctggaatatgatggagctggaggtgggaagagaagtaggcttggggcagctctctcatgccacctcattctggccaaaactcaggtcaaactgtgaagagtctaaatgtgaatctgcccttcaaggtggctacaaaggtatctttgtcaaggtaggagaccttgtggcctccacgtgcacttccagggcctgcttgggcctcttctacgggtctgtcctgagtcttctatgaatccttcagggcagattcatatttagactcttcacagtttgacctgagttttggccagaataaggtgacatttagtttgttggcttgatggatgacttaaatatttagacatggtgtgtaggcctgcattcctactcttgcctttttttttgcccctccagtgttttgggtagttttgctcccctacagccaaaggcaaacagagaagttggaggtctggagtggctacataattttacacgactgcaattctctggctgcacttcacaaatgtatacaaactaaatacaagtcctgtgtttttatcacagggaggctgatcaatataatgaaattaaaagggggctggtccatattgttctgtgtttttgtttgtttgttttgtttgtttctttttttgtttttgtggcctccttcctctcaatttatgaagagaagcagtaagatgttcctctcgggtcctctgagggacctggggagctcaggctgggaatctccaaggcagtaggtcgcctatcaaaaatcaaagtccaggtttgtggggggaaaacaaaagcagcccattacccagaggactgtccgccttcccctcaccccagcctaggcctttgaaaggaaacaaaagacaagacaaaatgattggcgtcctgagggagattcagcctagagctctctctcccccaatccctccctccggctgaggaaactaacaaaggaaaaaaaaattgcggaaagcaggatttagaggaagcaaattccactggtgcccttggctgccgggaacgtggactagagagtctgcggcgcagccccgagcccagcgcttcccgcgcgtcttaggccggcgggcccgggcgggggaagggcacgcagaccgcggaccctaagacacctgctgtaccctccacccccaccccaccccacccacctccccccaactccctagatgtgtcgtgggcggctgaacgtcgcccgtttaaggggcgggccccggctccacgtgctttctgctgagtgactgaactacataaacagaggccgggaagggggcggggaggagggagagcacaggctttgaccgatagtaacctctgcgctcggtgcagccgaatctataaaaggaactagtcccggcaaaaacccc

SEQ ID NO: 156 - DNA, 2888 bp, Homo sapiens
acagggcatggtggcaggtgcctgtaatctcagttactcgggaggtggaggttgcaatgagcccagatcgcaccattgcactccagcctgggcaacaaaaggtgaaactccatctcaattaaaaaaaaaagaatgattttggtggtcgacttcaaataggtaggagaagaaggagagaggagatggagggtcagggagatctaattactctctaaaatcatgctaggaaagataacaccttttaataacactctctgcttttataacatcattctgccaaggagctcaaaggtttcaacaaagttcactttcagaaaacccctttgaggaagacagaatatacatcttctctccattttaaagatgaagaaacaggccgggcacaatggctaatgcctgtaatcccagcactttgggaggctgaggccagaggatcgcttgagctccagagtttgagaccagcctggataacatggcaaaaccctgtctctacaaaaaaaatacaaaaattagatgggtgtggtggcatgcacctgtggtcccagctacttgggaggctaaggtgggaggatcgcttgagcccagggagtcaagtctacactgagccatgattggatcactgcactccagcctgggtagacagagcaagaccctgtctcaaaaaaaagaaatgaaagagaaagaaagaaagaggagaggagaggagatgaggggaggagggagggggggaggaaggaaggaaggaaggaaggaaaaaaagatgaaaaaagaaaaaaacaagatgaaacagaggcagaaagactttacgtaaattgctcatcatgtggttgtcaagtttgaccccaaaacccaatttattgaccaaggttattctttgactgaggcaagggggtccgctctcctgggccttgggctttagaaagctcatctctggcctttctgagatccatccctttctttttatttttcttgacacggagtcttgctctgtcactcaggctggagtgcagtggcatgatctcgactcactgtaacctctgcctcccgggttcaagcgattctcctgcctcagcctcctgagataacaggcgcccgccaccacatctggctaatttttgtatttttagtaaagactgggtttcatcatgttggccaggttggtttcgaactcctgacctgaggtgagctgcccaccttggcctcccaaagtgctgggattacaggcatgagccactgcgcccagctcagatccatccctttctaagggcaaacagtccatggtgcaaaggggccatgccacccagagttatgagtacctgggactccagaattccttgcctggtggcctccacatgcacttccagggcctgcttgggcctcttctatgcgtctgtcctgagtgttgatagaaccactgatgtgagtacctgggcttgagccgtggcctggagatcctgttgactgtagcatggagggggcttgtgcagctgaatgtctgcatgcaggtggtgggagttctggaatatgatggagctggaggtgggaagagaagtaggcttggggcagctctctcatgccacctcattctggccaaaactcaggtcaaactgtgaagagtctaaatgtgaatctgcccttcaaggtggctacaaaggtatctttgtcaaggtaggagaccttgtggcctccacgtgcacttccagggcctgcttgggcctcttctacgggtctgtcctgagtcttctatgaatccttcagggcagattcatatttagactcttcacagtttgacctgagttttggccagaataaggtgacatttagtttgttggcttgatggatgacttaaatatttagacatggtgtgtaggcctgcattcctactcttgcctttttttttgcccctccagtgttttgggtagttttgctcccctacagccaaaggcaaacagagaagttggaggtctggagtggctacataattttacacgactgcaattctctggctgcacttcacaaatgtatacaaactaaatacaagtcctgtgtttttatcacagggaggctgatcaatataatgaaattaaaagggggctggtccatattgttctgtgtttttgtttgtttgttttgtttgtttctttttttgtttttgtggcctccttcctctcaatttatgaagagaagcagtaagatgttcctctcgggtcctctgagggacctggggagctcaggctgggaatctccaaggcagtaggtcgcctatcaaaaatcaaagtccaggtttgtggggggaaaacaaaagcagcccattacccagaggactgtccgccttcccctcaccccagcctaggcctttgaaaggaaacaaaagacaagacaaaatgattggcgtcctgagggagattcagcctagagctctctctcccccaatccctccctccggctgaggaaactaacaaaggaaaaaaaaattgcggaaagcaggatttagaggaagcaaattccactggtgcccttggctgccgggaacgtggactagagagtctgcggcgcagccccgagcccagcgcttcccgcgcgtcttaggccggcgggcccgggcgggggaaggggacgcagaccgcggaccctaagacacctgctgtaccctccacccccaccccacccacctccccccaactccctagatgtgtcgtgggcggctgaacgtcgcccgtttaaggggcgggccccggctccacgtgctttctgctgagtgactgaactacataaacagaggccgggaagggggcggggaggagggagagcacaggctttgaccgatagtaacctctgcgctcggtgcagccgaatctataaaaggaactagtcccggcaaaaacccc

SEQ ID NO: 157 - DNA, 2893 bp, Homo sapiens
acagggcatggtggcaggtgcctgtaatctcagttactcgggaggtggaggttgcaatgagcccagatcgcaccattgcactccagcctgggcaacaaaaggtgaaactccatctcaattaaaaaaaaaagaatgattttggtggtcgacttcaaataggtaggagaagaaggagagaggagatggagggtcagggagatctaattactctctaaaatcatgctaggaaagataacaccttttaataacactctctgcttttataacatcattctgccaaggagctcaaaggtttcaacaaagttcactttcagaaaacccctttgaggaagacagaatatacatcttctctccattttaaagatgaagaaacaggccgggcacaatggctaatgcctgtaatcccagcactttgggaggctgaggccagaggatcgcttgagctccagagtttgagaccagcctggataacatggcaaaaccctgtctctacaaaaaaaatacaaaaattagatgggtgtggtggcatgcacctgtggtcccagctacttgggaggctaaggtgggaggatcgcttgagcccagggagtcaagtctacactgagccatgattggatcactgcactccagcctgggtagacagagcaagaccctgtctcaaaaaaaagaaatgaaagagaaagaaagaaagaggagaggagaggagatgaggggaggagggagggggggaggaaggaaggaaggaaggaaggaaaaaaagatgaaaaaagaaaaaaacaagatgaaacagaggcagaaagactttacgtaaattgctcatcatgtggttgtcaagtttgaccccaaaacccaatttattgaccaaggttattctttgactgaggcaagggggtccgctctcctgggccttgggctttagaaagctcatctctggcctttctgagatccatccctttctttttatttttcttgacacggagtcttgctctgtcactcaggctggagtgcagtggcatgatctcgactcactgtaacctctgcctcccgggttcaagcgattctcctgcctcagcctcctgagataacaggcgcccgccaccacatctggctaatttttgtatttttagtaaagactgggtttcatcatgttggccaggttggtttcgaactcctgacctgaggtgagctgcccaccttggcctcccaaagtgctgggattacaggcatgagccactgcgcccagctcagatccatccctttctaagggcaaacagtccatggtgcaaaggggccatgccacccagagttatgagtacctgggactccagaattccttgcctggtggcctccacatgcacttccagggcctgcttgggcctcttctatgcgtctgtcctgagtgttgatagaaccactgatgtgagtacctgggcttgagccgtggcctggagatcctgttgactgtagcatggagggggcttgtgcagctgaatgtctgcatgcaggtggtgggagttctggaatatgatggagctggaggtgggaagagaagtaggcttggggcagctctctcatgccacctcattctggccaaaactcaggtcaaactgtgaagagtctaaatgtgaatctgcccttcaaggtggctacaaaggtatctttgtcaaggtaggagaccttgtggcctccacgtgcacttccagggcctgcttgggcctcttctacgggtctgtcctgagtcttctatgaatccttcagggcagattcatatttagactcttcacagtttgacctgagttttggccagaataaggtgacatttagtttgttggcttgatggatgacttaaatatttagacatggtgtgtaggcctgcattcctactcttgcctttttttttgcccctccagtgttttgggtagttttgctcccctacagccaaaggcaaacagagaagttggaggtctggagtggctacataattttacacgactgcaattctctggctgcacttcacaaatgtatacaaactaaatacaagtcctgtgtttttatcacagggaggctgatcaatataatgaaattaaaagggggctggtccatattgttctgtgtttttgtttgtttgttttgtttgtttctttttttgtttttgtggcctccttcctctcaatttatgaagagaagcagtaagatgttcctctcgggtcctctgagggacctggggagctcaggctgggaatctccaaggcagtaggtcgcctatcaaaaatcaaagtccaggtttgtggggggaaaacaaaagcagcccattacccagaggactgtccgccttcccctcaccccagcctaggcctttgaaaggaaacaaaagacaagacaaaatgattggcgtcctgagggagattcagcctagagctctctctcccccaatccctccctccggctgaggaaactaacaaaggaaaaaaaaattgcggaaagcaggatttagaggaagcaaattccactggtgcccttggctgccgggaacgtggactagagagtctgcggcgcagccccgagcccagcgcttcccgcgcgtcttaggccggcgggcccgggcgggggaaggggacgcagaccgcggaccctaagacacctgctgtaccctccacccccaccccaccccacccacctccccccaactccctagatgtgtcgtgggcggctgaacgtcgcccgtttaaggggcgggccccggctccacgtgctttctgctgagtgactgaactacataaacagaggccgggaacggggcggggaggagggagagcacaggctttgaccgatagtaacctctgcgctcggtgcagccgaatctataaaaggaactagtcccggcaaaaacccc

SEQ ID NO: 158 - DNA, 2893 bp, Homo sapiens
acagggcatggtggcaggtgcctgtaatctcagttactcgggaggtggaggttgcaatgagcccagatcgcaccattgcactccagcctgggcaacaaaaggtgaaactccatctcaattaaaaaaaaaagaatgattttggtggtcgacttcaaataggtaggagaagaaggagagaggagatggagggtcagggagatctaattactctctaaaatcatgctaggaaagataacaccttttaataacactctctgcttttataacatcattctgccaaggagctcaaaggtttcaacaaagttcactttcagaaaacccctttgaggaagacagaatatacatcttctctccattttaaagatgaagaaacaggccgggcacaatggctaatgcctgtaatcccagcactttgggaggctgaggccagaggatcgcttgagctccagagtttgagaccagcctggataacatggcaaaaccctgtctctacaaaaaaaatacaaaaattagatgggtgtggtggcatgcacctgtggtcccagctacttgggaggctaaggtgggaggatcgcttgagcccagggagtcaagtctacactgagccatgattggatcactgcactccagcctgggtagacagagcaagaccctgtctcaaaaaaaagaaatgaaagagaaagaaagaaagaggagaggagaggagatgaggggaggagggagggggggaggaaggaaggaaggaaggaaggaaaaaaagatgaaaaaagaaaaaaacaagatgaaacagaggcagaaagactttacgtaaattgctcatcatgtggttgtcaagtttgaccccaaaacccaatttattgaccaaggttattctttgactgaggcaagggggtccgctctcctgggccttgggctttagaaagctcatctctggcctttctgagatccatccctttctttttatttttcttgacacggagtcttgctctgtcactcaggctggagtgcagtggcatgatctcgactcactgtaacctctgcctcccgggttcaagcgattctcctgcctcagcctcctgagataacaggcgcccgccaccacatctggctaatttttgtatttttagtaaagactgggtttcatcatgttggccaggttggtttcgaactcctgacctgaggtgagctgcccaccttggcctcccaaagtgctgggattacaggcatgagccactgcgcccagctcagatccatccctttctaagggcaaacagtccatggtgcaaaggggccatgccacccagagttatgagtacctgggactccagaattccttgcctggtggcctccacatgcacttccagggcctgcttgggcctcttctatgcgtctgtcctgagtgttgatagaaccactgatgtgagtacctgggcttgagccgtggcctggagatcctgttgactgtagcatggagggggcttgtgcagctgaatgtctgcatgcaggtggtgggagttctggaatatgatggagctggaggtgggaagagaagtaggcttggggcagctctctcatgccacctcattctggccaaaactcaggtcaaactgtgaagagtctaaatgtgaatctgcccttcaaggtggctacaaaggtatctttgtcaaggtaggagaccttgtggcctccacgtgcacttccagggcctgcttgggcctcttctacgggtctgtcctgagtcttctatgaatccttcagggcagattcatatttagactcttcacagtttgacctgagttttggccagaataaggtgacatttagtttgttggcttgatggatgacttaaatatttagacatggtgtgtaggcctgcattcctactcttgcctttttttttgcccctccagtgttttgggtagttttgctcccctacagccaaaggcaaacagagaagttggaggtctggagtggctacataattttacacgactgcaattctctggctgcacttcacaaatgtatacaaactaaatacaagtcctgtgtttttatcacagggaggctgatcaatataatgaaattaaaagggggctggtccatattgttctgtgtttttgtttgtttgttttgtttgtttctttttttgtttttgtggcctccttcctctcaatttatgaagagaagcagtaagatgttcctctcgggtcctctgagggacctggggagctcaggctgggaatctccaaggcagtaggtcgcctatcaaaaatcaaagtccaggtttgtggggggaaaacaaaagcagcccattacccagaggactgtccgccttcccctcaccccagcctaggcctttgaaaggaaacaaaagacaagacaaaatgattggcgtcctgagggagattcagcctagagctctctctcccccaatccctccctccggctgaggaaactaacaaaggaaaaaaaaattgcggaaagcaggatttagaggaagcaaattccactggtgcccttggctgccgggaacgtggactagagagtctgcggcgcagccccgagcccagcgcttcccgcgcgtcttaggccggcgggcccgggcgggggaaggggacgcagaccgcggaccctaagacacctgctgtaccctccacccccaccccaccccacccacctccccccaactccctagatgtgtcgtgggcggctgaacgtcgcccgtttaaggggcgggccccggctccacgtgctttctgctgagtgactgaactacataaacagaggccgggaagggggcggggaggagggagagcacaggctttgaccgatagtaacctctgcgctcggtgcagccgaatctataaaaggaactagtctcggcaaaaacccc

SEQ ID NO: 159 - DNA, 20 bp, Artificial sequence
  Description of Artificial Sequence: Synthetic oligonucleotide
accgaagtaaggagttgctc

SEQ ID NO: 160 - DNA, 22 bp, Artificial sequence
  Description of Artificial Sequence: Synthetic oligonucleotide
actgtttcactaatacttactg

SEQ ID NO: 161 - DNA, 10 bp, Artificial Sequence
  Description of Artificial Sequence: Illustrative oligonucleotide
tctataaaag

We claim:

1. A nucleic acid comprising a polynucleotide chosen from the group consisting of SEQ ID NOS: 24-126 and 137-158 and nucleic acids complementary to SEQ ID NOS: 24-126 and 137-158.

2. A nucleic acid comprising at least 9 consecutive nucleotides of a polynucleotide chosen from the group consisting of SEQ ID NOS: 24-126 and nucleic acids complementary to SEQ ID NOS: 24-126, and comprising a polymorphism chosen from the group consisting of s-m39i3, s-53e5, s-113e6, s-135e8, s-24il3, s-148e14, s-81i14, s-115i14, s-196e15, s-136e16, s-18i19, s-m65i22, s-149e24, s-44e27, s-7e30, s-62e34, s-m74i34, s-77e36, s-2843e49, s-25i4, s-123e8, s-m13i9, s-126e12, s-m59i13, s-4e18, s-40e19, s-m10i19, s-123e22, s-149i23, s-m50i23, s-166e30, s-m142i32, s-m19i40, s-114e45 s-m34i45, s-833e49, s-1580e49, s-1791e49, s-2049e49, s-35e1a, s-108e6, s-m89i8 s-m104i9, s-m29i12, s-107e17, s-m68i17, s-98e24, s-30i31, s-251i39, s-13i47 s-2034e49, s-2449e49, s-76e1b, s-27e17, s-60i17, s-54e23, s-m26i32, s-55i36, s-64e38, s-252i39, s-m69i44, s-86i47, s-377e49, s-m41i9, s-16e1b, s-14i7, s-m61i9, and s-m130i32.

3. A nucleic acid comprising at least 9 consecutive nucleotides of a polynucleotide chosen from the group consisting of SEQ ID NOS: 137-158 and nucleic acids complementary to SEQ ID NOS: 137-158, and comprising a polymorphism in the promoter sequence of the ABCA1 gene SEQ ID NO: 23, said polymorphism selected from the group consisting of i) an A at positions 505, 1642, 2091, ii) a T at positions 1093,1499,1677, 1795, 2330, 2592, 2880, iii) a G at positions 1080, 1242, 1954, iv) a C at positions 1388, 2487, 2616, 2795, v) an insertion of GGAGGGGAGG at position 717, an AT insertion at position 1859, and vi) a deletion of TTTG at position 2117, a deletion of TTTGTTTGT at position 2121, and a deletion of CACCC at position 2671.

4. The nucleic acid according to claim 2, comprising at least 21 consecutive nucleotides of a polynucleotide chosen from the group consisting of SEQ ID NOS: 24-126 and nucleic acids complementary to SEQ ID NOS: 24-126, and comprising a polymorphism chosen from the group consisting of s-m39i3, s-53e5, s-113e6, s-135e8, s-24il3, s-148e14, s-81i14, s-115i14, s-196e15 s-136e16, s-18i19, s-m65i22, s-149e24, s-44e27, s-7e30, s-62e34, s-m74i34, s-77e36, s-2843e49, s-25i4, s-123e8, s-m13i9, s-126e12, s-m59i13, s-4e18, s-40e19, s-m10i19, s-123e22, s-149i23, s-m50i23, s-166e30, s-m142i32, s-m119i40, s-114e45, s-m34i45, s-833e49, s-1580e49, s-1791e49, s-2049e49, s-35e1a, s-108e6, s-m89i8, s-m104i9, s-m29i12, s-107e17, s-m68i17, s-98e24, s-30i31, s-251 i39, s-13i47, s-2034e49, s-2449e49, s-76e1 b, s-27e17, s-60i17, s-54e23, s-m26i32, s-55i36, s-64e38, s-252i39, s-m69i44, s-86i47, s-377e49, s-m41i9, s-16e1b, s-m14i7, s-m61i9, and s-m130i32.

5. The nucleic acid according to claim 3, comprising at least 21 consecutive nucleotides of a polynucleotide chosen from the group consisting of SEQ ID NOS: 137-158 and nucleic acids complementary to SEQ ID NOS: 137-158, and comprising a polymorphism in the promoter sequence of the ABCA1 gene SEQ ID NO: 23, said polymorphism selected from the group consisting of i) an A at positions 505,1642, 2091, ii) a T at positions 1093, 1499, 1677, 1795, 2330, 2592, 2880, iii) a G at positions 1080, 1242,1954, iv) a C at positions 1388, 2487, 2616, 2795, v) an insertion of GGAGGGGAGG at position 717, an AT insertion at position 1859, and vi) a deletion of TTTG at position 2117, a deletion of TTTGTTTGT at position 2121, and a deletion of CACCC at position 2671.

6. The nucleic acid according to claim 4, wherein the polymorphism is located at the center of said at least 21 consecutive nucleotides.

7. The nucleic acid according to claim 5, wherein the polymorphism is located at the center of said at least 21 consecutive nucleotides.

8. A nucleic acid, wherein said nucleic acid hybridizes under high stringency conditions with a polynucleotide selected from the group consisting of SEQ ID NOS: 24-126, SEQ ID NOS: 137-158, sequences complementary to SEQ ID NOS: 24-126, and sequences complementary to SEQ ID NOS: 137-158.

9. A nucleic acid, wherein said nucleic acid encodes a polypeptide selected from the group consisting of SEQ ID NOS: 127-136.

10. A nucleic acid comprising:
a) a first nucleic acid comprising a polynucleotide chosen from the group consisting of the nucleotide sequences SEQ ID NOS: 137-158; and
b) a second nucleic acid encoding a polypeptide or a nucleic acid of interest.

11. A polymorphic ABCA1 polypeptide, comprising a sequence selected from the group consisting of SEQ ID NOS: 127-136.

12. A nucleotide probe or primer, comprising a nucleic acid according to claim 2 or claim 3.

13. The nucleotide probe or primer according to claim 12, further comprising a detectable label.

14. The nucleotide probe or primer according to claim 12, wherein a nucleotide at the 3′ end of said probe or primer is complementary to a nucleotide located immediately on the 3′ side of the polymorphic base of one of the sequences selected from the group consisting of SEQ ID NOS: 24-126, SEQ ID NOS: 137-158, sequences complementary to SEQ ID NOS: 24-126, and sequences complementary to SEQ ID NOS: 137-158.

15. The nucleotide probe or primer according to claim 12, wherein a nucleotide at the 3′ end of said probe or primer is complementary to a nucleotide located between 2 and 20 nucleotides or more on the 3′ side of the polymorphic base of one of the sequences selected from the group consisting of SEQ ID NOS: 24-126, SEQ ID NOS: 137-158, sequences complementary to SEQ ID NOS: 24-126, and sequences complementary to SEQ ID NOS: 137-158.

16. The nucleotide probe or primer according to claim 12, wherein a nucleotide at the 3′ end of said probe or primer is complementary to a nucleotide located more than 20 nucleotides on the 3′ side of the polymorphic base of one of the sequences selected from the group consisting of SEQ ID NOS: 24-126, SEQ ID NOS: 137-158, sequences complementary to SEQ ID NOS: 24-126, and sequences complementary to SEQ ID NOS: 137-158.

17. The nucleotide probe or primer according to claim 12, wherein said probe or primer identifies a genetic marker.

18. A method for detecting a nucleic acid according to claim 1 in a sample, said method comprising:
a) contacting said sample with a pair of nucleotide primers for which the hybridization position is located, respectively, on the 5′ side and on the 3′ side of a target polymorphic position to be amplified, in the presence of reagents required for an amplification reaction;
b) performing the amplification reaction; and
c) detecting the nucleic acids amplified.

19. A method for detecting a nucleic acid according to claim 2 in a sample, said method comprising:
a) contacting said sample with a pair of nucleotide primers for which the hybridization position is located, respectively, on the 5′ side and on the 3′ side of a target polymorphic position to be amplified, in the presence of reagents required for an amplification reaction;
b) performing the amplification reaction; and
c) detecting the nucleic acids amplified.

20. The method according to claim 18, wherein the pair of nucleotide primers are chosen from the primers comprising a nucleic acid according to claim 2 or claim 3.

21. The method according to claim 19, wherein the pair of nucleotide primers are chosen from the primers comprising a nucleic acid according to claim 2 or claim 3.

22. A kit for performing the method according to claim 18, wherein said kit comprises a pair of nucleotide primers for which the hybridization position is located, respectively, on the 5′ side and on the 3′ side of a target polymorphic position to be amplified of the nucleic acid.

23. The kit according to claim 22, further comprising reagents required for an amplification reaction.

24. A kit for performing the method according to claim 19, wherein said kit comprises a pair of nucleotide primers for which the hybridization position is located, respectively, on the 5′ side and on the 3′ side of a target polymorphic position to be amplified of the nucleic acid.

25. The kit according to claim 24, further comprising reagents required for an amplification reaction.

26. The kit according to claim 22, wherein the pair of nucleotide primers are chosen from the primers comprising a nucleic acid according to claim 2 or claim 3.

27. The kit according to claim 24, wherein the pair of nucleotide primers are chosen from the primers comprising a nucleic acid according to claim 2 or claim 3.

28. A method for detecting the presence of a polymorphism of an ABCA1 gene in an individual, said method comprising:
a) sequencing, from a biological material originating from the individual to be tested, all or part of the ABCA1 gene using a nucleotide primer according to claim 12;
b) aligning the nucleotide sequence obtained in a) with a sequence chosen from the group consisting of SEQ ID NOS: 1 and 3-23; and
c) determining the nucleotide differences between the sequenced polynucleotide originating from the biological material of the individual to be tested and the reference sequences SEQ ID NOS: 1 and 3-23.

29. A kit for performing the method according to claim 28, said kit comprising means for sequencing all or part of the ABCA1 gene.

30. A method for detecting the presence of a polymorphism of a ABCA1 gene in an individual, said method comprising:
a) bringing one or more nucleic acid probes according to claim 12 into contact with a sample originating from the individual to be tested;
b) incubating said one or more nucleic acid probes with the sample under conditions that permit the probes to hybridize with complementary nucleic acids in the sample; and
c) detecting complexes formed between the probes and the complementary nucleic acid present in the sample.

31. The method according to claim 30, wherein said one or more probes are immobilized on a support.

32. A kit for detecting the presence of a nucleic acid comprising a polynucleotide chosen from the group consisting of SEQ ID NOS: 24-126 and 137-158 and nucleic acids complementary to SEQ ID NOS: 24-126 and 137-158., wherein said kit comprises at least one nucleotide primer or probe according to claim 12.

33. The kit according to claim 32, further comprising reagents for a hybridization reaction.

34. The kit according to claim 32, wherein said at least one nucleotide primer or probe is immobilized on a support.

35. A method for diagnosing a risk of cardiovascular disorder in an individual, comprising determining whether said individual has a nucleic acid comprising a polynucleotide of sequence SEQ ID NO: 72 or 115, wherein said polynucleotide comprises a polymorphic base A at position 5382 of SEQ ID NO: 15.

36. The method according to claim 35, wherein the cardiovascular disorder is a myocardial infarction.

37. A recombinant vector comprising the nucleic acid according to claim 1 or a portion thereof.

38. The recombinant vector according to claim 37, wherein said vector is an expression vector.

39. A host cell transformed with the nucleic acid according to claim 1 or a portion thereof.

40. A host cell transformed with the recombinant vector according to claim 37.

41. A nonhuman, transgenic animal, wherein somatic cells and/or germ cells of said animal have been transformed with the nucleic acid according to claim 1 or a portion thereof.

42. A nonhuman, transgenic animal, wherein somatic cells and/or germ cells of said animal have been transformed with the vector according to claim 37.

43. An antibody directed against the polymorphic ABCA1 polypeptide according to claim 11 or a fragment thereof.

44. The antibody according to claim 43, further comprising a detectable label.

45. A method for detecting the presence of a polymorphic ABCA1 protein in a sample, comprising:
a) contacting the sample an antibody according to claim 43 under conditions permitting antibody/antigen complexes to form; and
b) detecting the antigen/antibody complex formed.

46. A kit for performing the method according claim 45, said kit comprising:
a) an antibody directed against a polymorphic ABCA1 polypeptide, wherein said peptide comprises a sequence selected from the group consisting of SEQ ID NOS: 127-136; and
b) a reagent which enables the detection of the antigen/antibody.
